(19) United States
(12) Patent Application Publication
(10) Pub. No.: US 2007/0037148 A1
(43) Pub. Date: Feb. 15, 2007

(54) Compositions and methods for the treatmetn of natural killer cell related diseases

(76) Inventors: Sherman Fong, Alameda, CA (US); Kathryn Dennis, Los Gatos, CA (US); Hilary Clark, San Francisco, CA (US); Henry Chiu, San Francisco, CA (US); Jill Schoenfeld, Ashland, OR (US); P. Mickey Williams, Half Moon Bay, CA (US); William I. Wood, Cupertino, CA (US); Thomas D. Wu, San Francisco, CA (US)

Correspondence Address: GENENTECH, INC., 1 DNA WAY, SOUTH SAN FRANCISCO, CA, 94080, US

(21) Appl. No.: 10/533,416

(22) PCT Filed: Nov. 6, 2003
(86) PCT No.: PCT/US03/35268

§ 371 Date: Apr. 17, 2006

Related U.S. Application Data
(60) Provisional application No. 60/193,767, filed on Mar. 31, 2000.

(51) Int. Cl. C12Q 1/68; C12M 1/34

(52) U.S. Cl. 435/6; 435/287.2; 427/2.11

(57) ABSTRACT

Compositions and methods for improving detection sensitivity in nucleic acid microarray analysis are disclosed, including methods of purifying nucleic acids, methods of synthesizing fluorescent DNA probes, methods of hybridization, and methods of activating a substrate for target molecule attachment are disclosed.

### FIELD OF THE INVENTION

[0001] This invention relates to compositions and methods for improved analysis of gene expression, genetic polymorphism or gene mutation using nucleic acid microarrays for genetic research and diagnostic applications.

### BACKGROUND

[0002] Nucleic acid microarrays, often containing thousands of gene sequences, are useful for identifying differential gene expression in diseased tissue relative to normal tissue of the same type, for example. Using nucleic acid microarrays, test and control mRNA samples from test and control tissue samples are reverse transcribed and labeled to generate cDNA probes. The probes are then hybridized to an array of nucleic acids immobilized on a solid support. The array is configured such that the sequence and position of each member of the array is known. For example, a selection of genes that have potential to be expressed in certain disease states may be arrayed on a solid support. Hybridization of a labeled probe with a particular array member indicates that the sample from which the probe was derived expresses that gene. Differential gene expression analysis of disease tissue can provide valuable information. For example, if hybridization of a probe from a test (disease tissue) sample is greater than hybridization of a probe from a control (normal tissue) sample, the gene or genes expressed in the diseased tissue may be a significant diagnostic indicator of a potential drug target.

[0003] Detection sensitivity is a limiting factor for effectively analyzing test versus control samples such that gene expression, a genetic polymorphism, or a gene mutation associated with the disease may be recognized. For the study of human genes using DNA microarrays, successful analysis of many disease states requires sensitive detection to work with limiting sample quantities.

### SUMMARY

[0004] The present invention relates to the discovery that detection of genetic differences, such as gene expression, genetic polymorphism, or gene mutation, in diseased tissue relative to normal tissue, between tissues at different developmental states, between individuals, and like comparisons, is improved by the compositions and methods disclosed herein. The compositions and methods are useful for quantifying the relative amount or a component of a cell, where the component is a nucleic acid (including a polynucleotide DNA or RNA), a polypeptide, a protein, an antibody, and the like, by determining the amount of a particular complex formed between the component (or its equivalent) and a target molecule on a support surface. For example, where the component is a mixture of polynucleotides from a first biological sample and a second biological sample, and the target molecule is a known or knowable nucleic acid sequence, the complexes are a hybridization complex between the target molecule and the first and/or second polynucleotides. The component is preferably labeled as a detectable probe such that the complexes are distinguishable one from the other and the relative amounts of the complexes may be determined as a measure of the amount of the component present in the First biological sample relative to the second biological sample.

[0005] In one aspect, the invention involves a microarray. The microarray of the invention comprises target molecules arrayed on a solid support substrate in distinct spots that are at known, knowable or determinable locations within the array on the support substrate. A spot refers to a region of target molecule attached to the support substrate as a result of contacting a solution comprising target molecule with the substrate. Preferably, each spot is sufficiently separated from each other spot on the substrate such that they are distinguishable from each other during detection of complex formation. The microarray of the invention comprises at least one spot/cm², 20 spots/cm², 50 spots/cm², 100 spot/cm², and greater densities, including at least 300 spots/cm², 1000 spots/cm², 3000 spots/cm², 10,000 spots/cm², 30,000 spots/cm², 100,000 spots/cm , 300,000 spots/cm² or more as the available technology allows. Preferably, the microarray of the invention comprises at least 2000 spots/cm² to 25,000 spots/cm².

[0006] In an embodiment, the invention involves a microarray of biopolymers on a solid support substrate, wherein the substrate is silanized and the silanization occurs with a silanizing agent in toluene as the solvent and in the absence of acetone or an alcohol (such as methanol, ethanol, propanol, butanol, or the like). In a preferred embodiment the silanizing agent is an organosilane and the solvent toluene is substantially dry, wherein the drying is by standard techniques known in the art. The organosilane may be any organosilane comprising an alkyl or aryl linker between the silicon atom and a reactive functionality capable of forming a covalent bond with a functionality on the biopolymer or on another linker molecule useful in the invention. Preferably, the alkyl or aryl linker of the organosilane is from one to 20 carbon atoms in length, preferably from 1 to 15, and most preferably from 2 to 6 carbon atoms, inclusive. In a related embodiment, the organosilane comprises a functionality that is capable of covalently attaching to the biopolymer directly or indirectly through another linker molecule. The functionality on the organosilane may be, for example, an epoxide, a halide, a thiol, or a primary amine (see, for example, U.S. Pat. No. 6,048,695; U.S. Pat. No. 5,760,130; WO 01/06011; WO 00/70088, published Nov. 23, 2000). A useful organosilane for practicing the invention is, for example, 3-aminopropyl triethoxysilane (APS) (see, for example, WO 01/06011; WO 60/40593; U.S. Pat. No. 5,760,130; and Weiler et al., Nucleic Acids Research 25(14):2792-2799 (1997)). According to this embodiment, the invention involves a microarray comprising a biopolymer covalently attached to a substrate wherein the substrate is silanized with a silanizing agent, and wherein the substrate is reacted with the silanizing agent in toluene in the absence of acetone or an alcohol, such as methanol, for example.

[0007] In another embodiment, the invention involves a microarray wherein the covalent attachment of the biopolymer to the substrate is indirect, such as, for example, through a linker molecule. Thus, according to this embodiment, the invention involves a microarray comprising a biopolymer attached to a silanized substrate, wherein the microarray comprises a linker molecule between a substrate-attached silane and the biopolymer. According to a related embodiment, the microarray comprises a biopolymer, a silanizing agent, a multifunctional linker reagent, and a substrate, wherein the biopolymer is attached to the multifunctional linker reagent, the multifunctional linker reagent is attached to the biopolymer and the silanizing agent, and the silanizing agent is attached to the substrate by a reaction in toluene in the absence of acetone or alcohol. Preferably, the attachment between the biopolymer and the multifunctional linker reagent is covalent. Preferably, the attachment between the multifunctional linker reagent and the silanizing agent is covalent. Preferably, the substrate is glass and the reaction between the silanizing agent and substrate forms a covalent bond. In a preferred embodiment, the attachments, whether covalent or non-covalent, are sufficiently strong such that the biopolymer remains in its original spot within the array during complex formation, washing steps, and detection steps of microarray analysis. For an example of non-covalent attachment of nucleic acids and oligonucleotide probes in array hybridization reactions, see, for example WO 01/06011.

[0008] According to a related embodiment, the microarray of the invention is prepared by a method comprising silanizing a substrate, such as glass, with a silanizing agent in toluene in the absence of acetone or alcohol, followed by reacting a reactive functionality of the substrate-attached silanizing agent with a biopolymer to generate a biopolymer attached to a substrate. Preferably, the biopolymer is unmodified prior to reacting with the substrate-attached silanizing agent. Alternatively, the biopolymer is modified with a reactive functionality that reacts with a functionality of the substrate-attached silanizing agent.

[0009] In a related embodiment, the microarray of the invention is prepared by a method comprising silanizing a substrate, such as glass, with a silanizing agent in toluene in the absence of acetone or an alcohol, followed by reacting the substrate-attached silanizing agent with a multifunctional linker reagent at one of its functionalities, followed by reacting another of the functionalities with a biopolymer. Preferably, the biopolymer is unmodified prior to reacting with the multifunctional linker reagent of the substrate-silanizing agent-multifunctional linker reagent linkage. Optionally, the biopolymer is modified with a reactive functionality that reacts with a reactive functionality on the multifunctional linker reagent of the substrate-silanizing agent-multifunctional linker reagent linkage. The biopolymer may be modified by any procedure appropriate for the biopolymer of interest. For example, where the biopolymer is a polynucleotide, a reactive functionality may be introduced into the polynucleotide during its synthesis or after it is synthesized. According to a non-limiting example disclosed herein, a primary amine is a reactive functionality introduced into the polynucleotide as a derivatized nucleic acid primer. Preferably, the multifunctional linker reagent comprises two or more pendent chemically reactive groups (functionalities) adapted to form a covalent bond with a corresponding functional group on a substrate surface and adapted to form a covalent bond with a corresponding functional group on a target molecule.

[0010] According to a related embodiment, a substrate surface of a microarray slide is derivatized with a silanizing agent and, optionally, with the multifunctional linker reagent to activate the microarray slide for immobilizing the target molecule, wherein the activating comprises (1) silanizing the surface with an organosilane in toluene, preferably in the absence of acetone or an alcohol (such as methanol, for example), wherein the organosilane comprises a functionality reactive with the multifunctional linker reagent, and wherein the activating further comprises immobilizing the multifunctional linker reagent on the silanized surface by covalently reacting a first pendent reactive group of the multi functional linker reagent with the reactive functionality of the organosilane; (2) providing a solution comprising a target molecule having one or more functional groups reactive with a second pendent reactive group of the immobilized multi functional linker reagent; and (3) attaching the target molecule to the substrate surface by contacting the target molecule with the activated substrate surface and allowing a functional group of the target molecule to form a covalent bond with the second pendent reactive group of the immobilized multifunctional linker reagent.

[0011] In an embodiment of the invention, the target molecule of the microarray is a nucleic acid, such as a polynucleotide of RNA, single stranded or double stranded DNA, a synthetic oligonucleotide, a peptide nucleic acid (PNA) in which the backbone is a polypeptide backbone rather than a ribose or deoxyribose backbone, a polypeptide, a protein, an antibody, a receptor, a ligand, or like molecule that is detectable by its ability to form a complex with another molecule, a detectable complexing agent. The polynucleotide may be from 5 nucleotides in length to and including 10 kb in length. Preferably, the polynucleotide is from approximately 100 bp to 5 kb, more preferably from 0.3 kb to 3 kb, and even more preferably from approximately 0.5 kb to 2 kb. In an embodiment in which the target polynucleotide is PCR amplified double stranded DNA, the length is preferably from 0.5 to approximately 2 kb. In an embodiment in which the target polynucleotide is a chemically synthesized oligonucleotide, the length is preferably from approximately 50-1000 nucleotides, 50-500 nucleotides, 50-200 nucleotides, 50-100 nucleotides.

[0012] In another embodiment, the invention involves a microarray of the invention wherein the attached target molecule is a modified polynucleotide and the modification is addition of an amine to the native polymer. Preferably the amine is a primary amine and is preferably at the 5′ end of the polynucleotide, but may be incorporated elsewhere, depending on the constraints of polynucleotide preparation or the needs of the microarray assay. Where a reactive group, such as a primary amine, is preferred to be at the 5′ end of a polynucleotide, the primary amine may be part of a primer that is enzymatically extended to produce the primary amine-modified polynucleotide.

[0013] In still another embodiment, the substrate surface of the microarray of the invention comprises material selected from the group consisting of polymeric materials, glasses, ceramics, natural fibers, nylon and nitrocellulose membranes, gels, silicons, metals, and composites thereof. Preferably the substrate is glass, more preferably a glass slide. Preferably the microarray substrate comprises at least one flat surface comprising at least one of these materials. Optionally, the substrate is in a form of threads, sheets, films, gels, membranes, beads, plates, and like structures.

[0014] In another embodiment, the microarray of the invention is prepared by contacting the target molecule with an activated substrate by a technique from the group consisting of printing, capillary device contact printing, microfluidic channel printing, deposition on a mask, and electrochemical-based printing, wherein the contacting creates a discrete target molecule-containing spot on the substrate (See, for example, U.S. Pat. No. 5,700,637, U.S. Pat. No. 5,445,934, and U.S. Pat. No. 5,807,522 for particular methods of array formation, or Cheung, V. G. et al., Nature Genetics 21 (Suppl): 15-19 (1999) for a discussion of array fabrication). It is understood that various additional contacting techniques are well known in the art or may be developed for depositing a target molecule to a solid support. Preferably, a technique is chosen that is accurate, efficient, and economical for the user. In preferred embodiments where the target molecule is a modified or unmodified polynucleotide, the target polynucleotide is contacted with the substrate in a solution, wherein the concentration of target polynucleotide in the solution is preferably the range of 0.1 μg/μl lo and including 3 μg/μl. The pH of the solution is in the range from approximately pH 6-10, preferably approximately pH 6.5-9.7, more preferably approximately pH 7-9.4. Preferably, the target polynucleotide solution further comprises 500 mM sodium chloride, 100 mM sodium borate, pH 9.3. Preferably, once the target biopolymer is contacted with the substrate under conditions according to the invention the reaction is rapid, preferably 1 hour or less, 30 minutes or less, 10 minutes or less, or live minutes or less. It was discovered as part of the invention that allowing more time for the target polynucleotide to react with the activated slide improves detection sensitivity. For example, where the target polynucleotide is a double stranded or single stranded cDNA comprising a primary amine functionality and the activated slides are prepared according to the present invention, the spotted slides are allowed to remain at ambient temperature and humidity for from 1-24 hours, preferably about 5-18 hours, more preferably about 10-16 hours, and even more preferably about 12-14 hours before washing the slides to remove unreacted target molecule and other spotting solution components in preparation for hybridization and detection procedures.

[0015] According to the embodiment, the invention also involves blocking unreacted activating functionalities on the surface (e.g. unreacted silanizing agent and/or unreacted multifunctional linker linker reagent). Blocking reactions useful in the invention include washing the slides with water.

[0016] In another aspect, the invention involves an activated microarray slide, wherein the term “slide” refers to a solid support comprising at least one substantially flat surface and the term “activated” refers to the presence of reactive groups on the slide capable of reacting with a modified or unmodified target biopolymer according to the invention to cause the target biopolymer to be immobilized on the surface, such as by covalent or non-covalent attachment. Preferably, the activated slide comprises a silanized surface wherein the silanization occurred in toluene in the absence of acetone or an alcohol, such as methanol, for example.

[0017] In a preferred embodiment, the activated slide further comprises a multifunctional linker reagent that is capable of linking the surface-attached silanizing agent to the target biopolymer, thereby being capable of immobilizing the target biopolymer on the microarray slide. Preferably, the multifunctional linker reagent reacts first with a reactive functionality on the silanizing agent leaving at least one pendent reactive group on the multifunctional linker reagent capable of forming an attachment with a functional group of the target molecule, wherein the attachment is non-covalent or covalent as long as the target molecule remains attached at its original location in the array. In a preferred embodiment, the surface comprises glass pretreated by silanizing in toluene in the absence or acetone or in alcohol with an organosilane comprising at least one reactive functionality that is reactive with at least one pendent reactive group of the multifunctional linker reagent for immobilizing the multifunctional linker reagent.

[0018] In a preferred embodiment the target molecule is a polynucleotide and the functional group of the target molecule is a hydroxy group, an epoxide, or an amine. Where the functional group on the target polynucleotide is an amine, it is preferably a primary amine. Optionally, the primary amine is preferably at the 5′ end of the polynucleotide. In another preferred embodiment, the silane is an aminosilane, where the amino group is reactive with a multifunctional reagent or a biopolymer.

[0019] In still another preferred embodiment, the silane is an organosilane comprising a reactive group reactive with a multifunctional reagent or biopolymer, wherein the organosilane is an alkyl silane and the alkyl moiety is selected from the group consisting of an ethyl-, a propyl-, a butyl-, a pentyl-, a hexyl-, a heptyl-, an octyl-, a nonyl-, and a decylalkyl moiety, and the reactive functionality of the organosilane is covalently linked to the alkyl moiety. The alkyl moiety comprises a cyclic portion. The organosilane may also comprise an aryl moiety linking the reactive functionalities to the silane. Where the reactive groups on the silane and the target biopolymer are primary amines, the reactive groups on the multifunctional linker reagent are preferably thiocyanate groups reactive with primary amines.

[0020] Accordingly, an embodiment of the invention involves an activated microarray slide comprising a silanized surface prepared by silanizing the surface with an aminosilane in toluene in the absence of acetone or an alcohol, and a multifunctional linker reagent attached to the silane; wherein at least one pendent reactive group of the multifunctional linker reagent is a thiocyanate moiety capable of reacting with an unmodified polynucleotide or a polynucleotide modified by the incorporation of a primary amine at its 5′ end.

[0021] In yet another aspect, the invention involves a method for preparing a solid support matrix to which nucleic acids are attached in making a nucleic acid array. According to the invention, toluene is used as a solvent in silane-based modification by PDITC chemistry. The invention derives from the discovery disclosed herein that DNA which is unmodified still attaches to an activated glass solid support, such as a glass slide. The advantage of the present invention is that the use of toluene as solvent in silanization of the glass, rather than acetone as the solvent, reduces the fluorescent background and improves the signal-to-noise ratio. In addition, the modified surface of the glass slide obtained by the method of the invention promotes the preparation of microarrays having improved nucleic acid spot morphology, such as reduced overlap with adjacent spots on a densely packed microarray slide, and uniform distribution of the nucleic acid on the surface comprising the spotted region.

[0022] In another aspect, the invention involves a method of attaching a target molecule to a surface of a substrate, the method comprising providing an activated microarray slide, wherein the activated slide comprises a silanized surface prepared by silanizing with an organosilane in toluene in the absence of acetone or an alcohol, and contacting a modified or unmodified biopolymer with the surface of the activated slide under conditions causing the biopolymer to covalently or non-covalently attach to the surface of the slide.

[0023] In an embodiment, the invention involves a reacting a multifunctional linker reagent with a reactive group on the organosilane such that the multifunctional linker reagent is attached (covalently or non-covalently) to the silane leaving at least one reactive group on the multifunctional linker reagent available to react with a modified or unmodified biopolymer. Preferably, the attachment of the multifunctional linker reagent to the silane is covalent. Preferably, the reactive groups on the multifunctional linker reagent are pendant in that reaction between the linker and a modified or unmodified biopolymer is not sterically hindered.

[0024] In an embodiment, the invention involves a method of attaching a target molecule to a surface of a substrate, wherein the method comprises first providing a solid support surface comprising at least one substantially flat surface. Next, the solid support surface is silanized with a silanizing agent in toluene in the absence of acetone or an alcohol, wherein the silanizing agent comprises a reactive functionality reactive with a target biopolymer. The target biopolymer is then contacted with the surface under conditions causing the target biopolymer to become attached to the silanizing agent on the surface, thereby immobilizing the target biopolymer on the surface. Where the biopolymer is unmodified, the reactive group on the silanizing agent is reactive with a naturally occurring functionality on the biopolymer. Where the target biopolymer is modified, it is preferably modified with a reactive group that is capable of reacting with and forming an attachment to a functionality on the silanized surface of the support.

[0025] In a related embodiment, the invention involves a method of attaching a target biopolymer to a support surface of a substrate, wherein the method is like that just described except that after silanizing the surface, a multifunctional linker reagent is attached to the silane followed by attachment of the target biopolymer to the multifunctional linker. Preferably, the multifunctional linker reagent comprises a first reactive group that reacts with a functionality on the silane and a second reactive group that reacts with a functionality on the target biopolymer. The reactive groups of the silane, the multifunctional linker reagent and, optionally, a modified biopolymer are chosen to allow rapid and efficient reaction and attachment of the molecules to the surface. Preferably, the silane is an aminosilane, the linker is a diisothiocyanate compound, and the biopolymer, if modified, is modified with a 5′ primary amine. In a preferred embodiment, the silane is an organosilane, such as 3-aminopropyltriethoxysilane. In another preferred embodiment, the multifunctional linker reagent is phenylene diisothiocyanate. Optionally, the target biopolymer is unmodified prior to reaction with the silane or the linker reagent.

[0026] In another aspect, the invention involves an improved method of nucleic acid (DNA and RNA) purification from tissue samples. The method comprises, in part, a modified cesium chloride purification useful for nucleic acid preparations from tissues or cell culture, for example. The highly purified RNA according to the invention, for example, is useful for the making of probes directly from RNA without a polyA+ purification step, which step causes substantial loss of starting RNA material. The method is also useful to re-purify commercially available RNAs to improved detection sensitivity.

[0027] In one aspect, the invention involves improved methods for generating fluorescently labeled sDNA probes from small quantities of nucleic acids, particularly ribonucleic acids. In mammalian tissue, for example, approximately 1% of the total RNA is messenger RNA/polyA+ RNA. Because mRNA/polyA+ RNA is the material providing the initial template for DNA probe synthesis, it is available in very small amounts against a complex background of non-messenger RNAs (ribosmal RNA, transfer RNA, and the like). Consequently, the method of the invention for DNA probe synthesis provides an advantage because the quantities of RNA useful as a template according to the present method are 100-1000 fold less than the amounts useful in previously known methods.

[0028] According to this aspect, the invention involves a method of preparing a nucleic acid probe capable of forming a detectable complex with a target molecule, the method comprises isolating an amount of RNA from a biological sample; synthesizing a mixture of detectably labeled cDNA probes complementary to the isolated RNA in the presence of a detectably labeled deoxyribonucleotide; degrading ribonucleic acid with RNase; decreasing the average length of the labeled cDNA probes in the preparation to he from approximately 0.5 kb to approximately 2 kb by limited DNase digestion; and isolating the labeled cDNA probes. According to the invention, the isolated RNA is total cellular which includes messenger RNA. Preferably, the biological sample is selected from the group consisting of a cell, a tissue sample, a body fluid sample, and a mixture of synthetic oligonucleotides.

[0029] In an embodiment, the invention involves a method for generating fluorescently labeled sDNA probes using small quantities of total cellular RNA, where the quantities are nanograms or picograms. Such small amounts of total RNA are equivalent to low picogram or femtogram quantities of cellular messenger RNA, where mRNA is the actual template for reverse transcription to sDNA. Additional embodiments of the invention include generating fluorescently labeled DNA probes from RNA isolated from cells, such as cells in tissue or in cell culture. Where the cells are from tissue, such as diseased human tissues, tumor cells are microdissected nearby non-tumor cells in the diseased tissues. Tissue from which total RNA is isolated includes non-diseased and diseased tissue and further includes fresh tissue, frozen tissue, and formalin-fixed paraffin-embedded tissue. According to the invention, the amount of isolated total cellular RNA is from approximately 0.01 pg to and including approximately 10 mg, 1 pg to and including 10 μg, 100 pg to and including 100 ng, and 500 pg to and including 10 ng.

[0030] In an embodiment of the method of preparing a cDNA probe, the invention involves the additional steps of synthesizing double stranded DNA from messenger RNA in the isolated total cellular RNA, followed by synthesizing RNA complementary to the double stranded DNA. It is understood that cellular DNA may be isolated from the biological sample and used as starting material for a DNA or cRNA probe according ot the invention.

[0031] In another embodiment, the method of preparing a cDNA probe involves labeling the synthesized cDNA probe by incorporating a detectably labeled deoxyribonucleotide. Preferably, the labeled deoxyribonucleotide is dUTP. In a related embodiment the synthesizing of the labeled cDNA probe is performed in the presence of labeled and unlabeled dUTP and in the absence of dTTP.

[0032] Preferably, the detectable label is a fluorescent molecule and the detection is by fluorescence emission. Other methods of detection may be used, including, but not limited to, radioisotope labeling and detection, as well as mass spectrometry (see, for example, Marshall, A. and Hodgson. J. Nature Biotechnology 16:27-31 (1998)).

[0033] Preferably, where the biological sample is a cell culture or tissue sample, the cells of interest from the culture or tissue are specifically extracted from the biological sample generally independent from surrounding cells that of a different type or different disease state that are present nearby in the tissue or culture. Preferably, a control sample (e.g. a sample of normal tissue) comprises cells removed from the tissue source by laser capture microdissection, wherein the cell source is selected from the group consisting of untreated tissue, frozen tissue, paraffin-embedded tissue, stained tissue, and cell culture. Preferably, a test sample (e.g. a sample of diseased tissue) comprises cells removed from the tissue source by laser capture microdissection, wherein the cell source is selected from the group consisting of untreated tissue, frozen tissue, paraffin-embedded tissue, stained tissue, and cell culture.

[0034] In another aspect, the invention involves a method for generating fluorescently labeled cRNA probes from small quantities of total cellular RNA, where the quantity is nanograms or picograms. Such small amounts of total RNA are equivalent to low picogram or femtogram quantities or cellular messenger RNA, where mRNA is the actual template for generation of double stranded DNA followed by transcription to cRNA. Additional embodiments of the invention include generating fluorescently labeled cRNA probes ultimately from RNA isolated from cells, such as cells in tissue or in cell culture. Where the cells are from tissue, such as diseased human tissues, tumor cells are microdissected nearby non-tumor cells in the diseased tissues. Tissue from which total RNA is isolated includes non-diseased and diseased tissue and further includes fresh tissue, frozen tissue, and formalin-fixed paraffin-embedded tissue.

[0035] In an embodiment, the invention involves a method of preparing a nucleic acid probe capable of forming a detectable complex with a target molecule, where the method comprises isolating an amount of RNA from a biological sample; synthesizing a mixture of detectably labeled complementary RNA probes by synthesizing double stranded DNA from messenger RNA in the isolated RNA, followed by synthesizing RNA complementary to the double stranded DNA in the presence of a detectably labeled ribonucleotide; and isolating the labeled cRNA probes. Optionally, sDNA is prepared by synthesizing cRNA complementary to the double stranded DNA, but in the absence of fluorescent deoxynucleotides, followed by synthesizing sDNA probes from the cRNA in the presence of labeled fluorescently labeled deoxynucleotides and using random primers. Random priming controls the length of the sDNA probes. Preferably, the average length of the labeled sDNA probes is from approximately 0.5 kb to approximately 3 kb, preferably from approximately 0.5 kb to approximately 2 kb. For cDNA probes, the average length is altered, if necessary, by mild Dnase digestion. For cRNA probes the average length of the labeled probes is decreased by mild RNase digestion or limited fragmentation by resuspending the precipitated, labeled cRNA probes in 40 mM tris-acetate, pH 8.1, 100 mM potassium acetate, 30 mM magnesium acetate, followed by heating at 70° C. for 10 min. Preferably, the isolated RNA is total cellular RNA. Preferably, the biological sample is selected from the group consisting of a cell, a tissue sample, a body fluid sample, and a mixture of synthetic oligonucleotides.

[0036] In another embodiment, the method of preparing a cRNA probe involves labeling the synthesized cRNA probe by incorporating a detectably labeled ribonucleotide. Preferably, the ribonucleotide is UTP. Preferably the detectable label is a fluorescent molecule. In a related embodiment the synthesizing of the labeled cRNA probe is performed in the presence of labeled and unlabeled UTP.

[0037] In another aspect, the invention involves a method for generating fluorescently labeled sDNA (sense strand DNA) probes from small quantities of total cellular RNA, where the quantity is nanograms or picograms. Such small amounts of total RNA are equivalent to low picogram or femtogram quantities of cellular messenger RNA, where mRNA is the actual template for generation of double stranded DNA followed by transcription to cRNA as an amplification step and without incorporation of label in the cRNA. To generate labeled sDNA probes, the cRNA is reverse transcribed in the presence of fluorescent nucleotides, preferably fluorescent dUTP nucleotides.

[0038] In still another aspect, the invention involves a method for generating fluorescently labeled sDNA probes from total cellular RNA without amplification. According to the invention, total cellular RNA was used as the starting material for first strand DNA synthesis. Labeled sDNA probes are prepared by direct synthesis of a second strand DNA from the first strand using the Klenow fragment of DNA polymerase I.

[0039] According to the invention, the amount of isolated RNA useful for probe synthesis (cDNA, cRNA, or sDNA probes) is from approximately 0.01 pg to and including approximately 10 mg. 0.5 pg to and including 1 ng, 1 pg to and including 500 μg, 10 pg to and including 10 μg, 100 pg to and including 100 ng, and 500 pg to and including 10 μg.

[0040] According to the methods of preparing nucleic acid probes, the invention involves deriving control nucleic acid probes from total cellular RNA from a control sample comprising a single or pooled mixture of samples of similar tissue type, tissue origin, developmental stage, or the like. For example, the control sample comprises samples of normal tissue of the same organ from different donors or derived from the same tissue type from the same or different donors. For example, in one embodiment, the invention involves pooling multiple epithelial tissues as a control sample from which a control nucleic acid probe is derived for use in detecting gene expression or copy numbers in comparison with expression or copy numbers in a test carcinoma. In a related embodiment, the control sample is a mixture of cells from one or more cell cultures, where the cells are pooled prior to isolation of total cellular RNA. A control nucleic acid probe generated from pooled cell cultures is compared to a test nucleic acid probe in its ability to complex with a target molecule. According to the invention, the test nucleic acid probe may also be derived from a mixture of test tissue cell samples or test cell culture samples.

[0041] In another aspect, the invention involves a method of preparing glass slides for application of nucleic acid in a microarray pattern, wherein the method involves cleaning the slides with detergent and alkali; silanizing the slides with an organosilane in toluene in the absence of acetone or an alcohol; optionally reacting the organosilane with a multifunctional linker reagent capable of reacting with a functional group of the organosilane and a target molecule; followed by contacting the activated surface (comprising the reactive organosilane attached to the surface or, if present, the multifunctional linker reagent attached to the organsilane) under conditions that cause the target molecule to be attached to the surface by covalent or non-covalent attachment. The method also involves the steps of washing the silanized slides in solvents including toluene, methanol, water, and methanol to remove unreacted compounds and drying the slides after the attachment of the organosilane, the multifunctional linker reagent, and the target molecule.

[0042] In an embodiment, the toluene is at least 50% of the solvent in the silanizing step, preferably at least 80%, more preferably at least 90%, more preferably at least 95%, still more preferably at least 99%, and most preferably the toluene is at least 99% of the solvent in the silanization reaction mixture and is dried by standard techniques and of standard purity suitable for efficient silanization reactions and minimal background fluorescence during subsequent detection steps according to the invention.

[0043] In another embodiment, the invention involves a method of attaching a modified target polynucleotide to a microarray solid support, wherein the method comprises obtaining a nucleic acid primer comprising a reactive group covalently attached to its 5′ end by a linker, wherein the primer is complementary to sequences outside the target polynucleotide; amplifying the target polynucleotide by polymerase chain reaction to produce modified target polynucleotide comprising the reactive group; obtaining an activated microarray comprising on a surface a surface reactive group capable of reacting with the modified target polynucleotide reactive group, wherein the microarray solid support is pretreated by silanizing the surface with an organosilane in toluene; contacting the modified target polynucleotide with the microarray solid support, whereby the modified target polynucleotide reactive group and surface reactive group react covalently attaching the modified target polynucleotide to the microarray solid support. Preferably, the modified target polynucleotide reactive group comprises a primary amine and the surface reactive group comprises a isothiocyanate moiety.

[0044] In another aspect, the invention invloves a method of analyzing a biopolymer target on a microarray, wherein the method comprises providing a microarray slide comprising a target biopolymer attached to a silanized substrate surface, prepared by silanizing with an organosilane in toluene in the absence of acetone or an alcohol; contacting the attached target molecule with an agent capable or forming a detectable complex with the target molecule under conditions that allow formation of a detectable complex; detecting formation of a detectable complex; determining the amount of a detectable complex formed.

[0045] In an embodiment, the agent capable of forming a detectable complex comprises (1) a control mixture of nucleic acid probes comprising a first detectable label, wherein the probes are prepared from nucleic acid isolated from a control sample, and (2) a test mixture of nucleic acid probes comprising a second detectable label, wherein the probes are prepared from nucleic acid isolated from a test sample, wherein the first and second detectable labels, and the nucleic acid molecules to which they are attached, can be detectably distinguished one from the other for ease of determining the presence of, and optionally, the relative amounts of the probes in a mixture or the amounts of control and test probes forming complexes with a particular target molecule on a microarray. The method further involves pooling the control probes and the test probes; contacting the pooled probes with a target molecule on a microarray slide prepared according to the invention under conditions that allow the formation of specific detectable complexes between a control probe or a test probe; and comparing the amount of detectable complex formed between the target molecule and the control probes relative to the amount of complex formed between the target molecule and the test probes. Individual probes can also be singly hybridized to a microarray to generate quantitative expression data that can be compared to data from other singly hybridized or pooled probe hybridized microarrays. Preferably the target molecule is a target polynucleotide and probes are either cDNA probes cRNA probes, or sDNA probes, or a combination of these. Preferably the label is optically detectable, such as by fluorescence emission. Preferably the complex formation between the target molecule and the probes occurs in the absence of detergent, although a subsequent washing step optionally involves a solution comprising a detergent. In an embodiment of the invention, sodium dodecyl sulfate (SDS) is eliminated from the hybridization solution in which a complex is formed between the target molecule and the probes. In yet another embodiment, hybridization is performed in the presence of an alkylammonium salt, DMSO and formamide to further improve complex formation.

[0046] In another aspect, the invention involves a method of hybridizing a detectable polynucleotide probe to a target polynucleotide on a support surface, the method comprising: (a) contacting the probe with denatured target polynucleotide on the support surface in the absence of detergent; and (b) detecting formation of a complex between the target polynucleotide and the delectably labeled polynucleotide probe. In an embodiment of the invention, sodium dodecyl sulfate (SDS) is eliminated from the hybridization step. In another embodiment of the invention, hybridization efficiency is improved by using a hybridization solution comprising formamide and one or more or an alkylammonium chloride (preferably tetrameythlammonium chloride, or tetraethylammonium chloride, or both) and dimethylsulfoxide (DMSO).

[0047] According to the invention, the test sample and control sample differ from each other according to one or more of developmental state, disease state, pre-disease state, cell type, sample source, and experimental treatment conditions. Optionally, according to the invention, the control sample comprises a mixture of samples that differ from the test sample according to one or more of developmental state, disease state, cell type, sample source, and experimental treatment conditions. Optionally, according to the invention, the test sample comprises a mixture of samples that differ from the control sample according to one or more of developmental state, disease state, cell type, sample source, and experimental treatment conditions.

[0048] In an embodiment of the invention, the target molecule is a polynucleotide and the nucleic acid isolated from the test sample and the control sample is RNA, and wherein the comparing provides a measure of target polynucleotide expression in the test sample relative to target polynucleotide expression in the control sample. Preferably, the relative measure of target polynucleotide expression indicates a disease state in the test tissue sample, and the disease state is selected from the group consisting of all forms of cancer, cardiovasular disease, neurological disease, inflammation, and any disease that may be characterized by an alteration in gene expression relative to a non-disease state. In a related embodiment, the relative measure of target polynucleotide expression indicates a predisease state in the test tissue sample. In another related embodiment, the target molecule is a polynucleotide and the nucleic acid isolated from the test sample and the control sample is DNA, and wherein the comparing provides a measure of number of copies of the target polynucleotide in cells of the test sample relative to target polynucleotide copies in the control sample, and the relative measure of the number of copies of target polynucleotide indicates a disease state or a pre-disease state in the test tissue sample.

### DESCRIPTION OF THE EMBODIMENTS

[0049] Definitions

[0050] As used herein, the terms “attached,” “attachment,” “bound,” and like terms refer to a physical or chemical linkage between at least two molecules. For example, where the attachment is between a target molecule and a substrate surface, the attachment is preferably a covalent chemical bond. Where the attachment is between a target molecule to be immobilized on a substrate surface and a reactive linker reagent on the surface, the attachment is preferably covalent. Electrostatic, hydrophobic, hydrophilic, or other noncovalent chemical bonds may form the attachment, however, if such noncovalent bonds prevent migration of the target molecule from its initial point of contact on the support surface. Where the binding is within a complex between a target molecule and an agent (a probe) capable of complexing with the target molecule, the binding is preferably eletrostatic, hydrophobic, hydrophilic, or other noncovalent binding.

[0051] As used herein, the term “biopolymer” refers to a target molecule of interest that may be attached to a substrate according to a procedure appropriate to the structure of the biopolymer. Optionally, the bioplymer is a nucleic acid sequence, including a single stranded or double stranded polynucleotide, where the polynucleotide may be RNA, DNA, or PNA (peptide nucleic acid, wherein the nucleotide backbone is a peptide backbone). Where the biopolymer is a protein, such as a ligand, a receptor, an antibody, cell surface protein, and the like, the probe is, for example, a receptor, ligand, antibody polynucleotide, or other biopolymer or smaller molecule capable of forming a complex with the target protein. Preferably, the biopolymer is known, knowable, determinable, or otherwise identifiable.

[0052] As used herein, the term “detergent” refers to a surfactant useful for causing or enhancing denaturation of target molecules as well as enhancing wetting of the support surface during hybridization. Non-limiting examples of detergents includes sodium dodecylsulfate (SDS), Triton X-100, Nonidet P-40, and Tween-20.

[0053] As used herein, the term “discernable,” or “distinguishable,” with regard to detection of a complex formed by a target molecule with a control probe versus a complex formed by a target molecule and a test probe, refers to the ability to detect a control complex as different from a test complex by direct visual detection or assisted detection through the use of a detecting instrument. For example, a complex comprising a control probe labeled with a first fluorescent dye is discernable from a complex comprising a test probe labeled with a second fluorescent dye where the first and second dyes emit at different wavelengths.

[0054] As used herein, the phrase “disease state” refers to an abnormal state of a cell or a tissue, where the abnormal state in a living animal or plant results in illness or death. Non-limiting examples of a cell or tissue in a diseased state include all forms of cancer, cardiovasular disease, neurological disease, inflammation, and any disease that may be characterized by an alteration in gene expression relative to a non-disease state.

[0055] As used herein, the term “dye 488” refers to a dUTP- or UTP-derivatized fluorochrome, where the fluorescent chromophore excites at a wavelength of 488 nm and emits around a peak wavelength of 530 nm. The Alexa Fluor 488 Dye (Molecular Probes, Inc.) is an example of such a dye. Commonly used fluorescein dye also emits at this wavelength, the green region of the visible spectrum, and is useful in the invention. The preferred dye for use in the present invention is the most intensely emitting chromophore available to the user, which is more photostable than fluorescein, and which is relatively unaffected by variations in the pH range used in microarray hybridization analysis (for example between pH 4 to 10). In addition. Alexa Fluor Dye 488 is advantageous because it has a narrower emission spectrum which results in reduced fluorescence interaction with dye 546, thereby allowing improved signal-to-noise ratios.

[0056] As used herein, the term “dye 546” refers to a dUTP- or UTP-derivatized fluorochrome, where the fluorescent chromophore excites at a wavelength of 546 nm and emits around a peak wavelength of 590 nm. The Alexa Fluor 546 Dye (Molecular Probes, Inc.) is an example of such a dye. Commonly used Cy3 dye and tetramethylrhodamine (TRITC and TAMRA) also emit at this wavelength, the red region of the visible spectrum, and are useful in the invention. The preferred dye for use in the present invention is the most intensely emitting chromophore available to the user.

[0057] As used herein, a “glass slide,” with respect to microarray solid support, refers to a piece of planar silica-based glass of a size, shape, and thickness to allow convenient manipulation of the slide during microarray preparation and subsequent microarray analyses.

[0058] As used herein, a “multifunctional linker reagent” refers to a molecule capable of binding to another molecule, polymer, or surface while also capable of binding to still another molecule, polymer, or surface. For example, a linker molecule comprises at least two reactive groups capable of such binding to two or more other molecules. According to the invention, examples of linker molecules include an organosilane capable or binding to a surface (such as a glass surface) through an alkoxy silyl moiety, and capable of reacting with a target molecule or another linker molecule. Another linker molecule may be a bifunctional reagent capable of reacting with a reactive functionality on a surface-bound organosilane as well as being capable of reacting with an unmodified or modified target molecule.

[0059] As used herein, the term “normal tissue” refers to tissue in which no discernable disease is observed according to standard medical diagnostic methods, or at least a disease state of a test sample is not present in the control normal tissue sample.

[0060] As used herein, the term “nucleic acid” refers to a deoxyribonucleoside or ribonucleoside, or a deoxyribonucleotide or ribonucleotide polymer in either single-stranded or double-stranded form. The term further encompasses nonnatural analogs of natural nucleotides, such as peptide nucleic acids.

[0061] As used herein, the term “oligonucleotide” refers to a single-stranded nucleic acid sequence comprising from 2-1000 nucleotides in length, 10-750 nucleotides, 20-500 nucleotides, 50-400 nucleotides, or 50-200 nucleotides in length. An oligonucleotide may be chemically synthesized by standard techniques in the art of nucleic acid synthesis. Such techniques included, but are not limited to solid phase synthesis followed by release of the oligonucleotide from the solid phase prior to attachment to a microarray slide, and solid phase synthesis on a microarray slide (see, for example, U.S. Pat. No. 5,445,934).

[0062] As used herein, the phrase “pre-disease state” refers to an abnormal state of a cell or a tissue, where the abnormal state in a living animal or plant may not be detectable. The pre-disease state in the animal does, however, predispose the animal to eventual development of a disease state. Non-limiting examples of a pre-disease state include abnormal levels of genetic material, such as gene copy numbers, abnormal sequences of genetic material, such as disease-associated polymorphisms, changes in gene expression that frequently precede a disease state, as well as genetic profiling or tumor subtypes (see, for example, Hacia, J. G., Nature Genetics 21(Suppl):42-47 (1999); Heiskanen, M. A. et al., Cancer Research 60:41-46(2000); Pollack, J. et al., Nature Genetics 23:41-46 (1999); DeRisij, et al., Nature Genetics 14:457-460 (1996); Berns, A., Nature 403:491-492 (2000); and Alizadeh, A. A. et al., Nature 403:503-511 (2000); Marx, J., Science 289:1670-1672 (2000)).

[0063] As used herein, the term “probe” refers to an agent, preferably a detectably labeled agent, capable of forming a complex with a target molecule immobilized on a surface. Where the target molecule is a polynucleotide, the probe is another polynucleotide, a nucleic acid specific binding protein or antibody, or other nucleic acid binding molecule. For example, the probe is another polynucleotide such as RNA or DNA or a peptide nucleic acid (PNA, nucleic acid having a peptide backbone). Where the target molecule is a protein, such as a ligand, a receptor, an antibody, cell surface protein, and the like, the probe is, for example, a receptor, ligand, antibody, polynucleotide, or other biopolymer or smaller molecule capable of forming a complex with the target protein. Preferably, the complex formed between the target molecule and the agent is specific and detectably distinguishable from complex formation with other target molecules in a microarray. It is noted that the term “probe” is occasionally used to describe the immobilized biopolymer attached to a microarray surface, For the purposes of the present disclosure, the term “probe” will be used to refer to a labeled molecule capable of forming a complex with an immobilized molecule (the “target” as used herein) on a support surface.

[0064] As used herein, the phrase “reactive functionality at the 5′ end” of a polynucleotide, refers to a reactive functionality (chemically reactive moiety of a chemical compound) attached directly or indirectly via a linker, where the site of attachment is within 50 bp, 20 bp, 10 bp, 5 bp, or 2 bp of the 5′ end of the nucleic acid sequence. Preferably, the reactive functionality is within the 5′ terminal nucleotide, either on the nucleotide base or on the deoxyribose.

[0065] As used herein, the term “silanizing,” with respect to activating microarray slides, refers to reacting a silane with a substrate surface such that the silane attaches to the substrate surface. According to the invention, silanizing a microarray substrate surface refers to the reaction in which the silane reacts with a siloxy group on the surface. According to the invention, the silanizing occurs in toluene and in the absence of acetone or an alcohol. The toluene of the silanizing reaction is preferably substantially dry (such as commercially available reagent grade toluene). According to the invention, acetone or an alcohol may contact the microarray slide during other, non-silanizing reactions or washes, but contact with acetone is preferably limited to 3 hours or less, preferably 2 hours or less, followed by thorough drying to remove the acetone. Preferably, the surface comprises silica. More preferably the surface is a silica-based glass. According to the invention, the silane preferably comprises a plurality of reactive functionalities (or reactive groups), wherein at least one reactive group is capable of reacting with the surface causing the silane to be attached to surface, and at least one other reactive functionality which is capable of reacting with a reactive functionality of a target molecule, thereby attaching the target molecule to the silane and, ultimately, to the substrate surface. Optionally, the target molecule attaches to a multifunctional linker reagent that, in turn, attaches to the silane via reactive functionalities on the multifunctional linker reagent and the silane. It is understood that the linker reagent may comprise multiple linker reagent monomers.

[0066] As used herein, the term “spotting” or “tapping,” with respect to depositing a target molecule on a microarray substrate surface, refers to contacting the surface with a device, such as a microarray printing pin, containing a target molecule such that the target molecule is deposited on the surface and is in contact with the surface of the microarray. Preferably, the spotting or tapping is via a capillary or other tube (such as within the printing pin) capable of depositing a small volume of solution comprising target molecule on the surface, wherein the volume is 1 μl or less, 100 nl or less, 10 nl or less, 5 nl or less, 2 nl or less, 1 nl or less, or 0.5 nl or less. Preferably the spot formed by depositing the target molecule solution on the surface is separated from other spots on the microarray such that subsequent hybridization or other reaction on the array is not adversely affected by reactions on neighboring or nearby spots. Preferably, the spot is from 50-500 microns, from 75-300 microns, or from 100-150 microns in diameter.

[0067] As used herein, the term “substrate” refers to a solid support to which, according to the invention, a target molecule is attached, either directly or indirectly, by coupling one or more linker molecules to the substrate and ultimately to the target molecule. Non-limiting examples of substrate according to the invention include polymeric materials, glasses, ceramics, natural fibers, silicons, metals, and composites thereof. The substrate has at least one surface that is substantially flat. As used herein, the phrase “substantially flat” with regard to a substrate surface refers to a surface that is macroscopically planar for more convenient application of target molecules in a two-dimensional array. Alternatively, the substrate may have a spherical surface or an irregular surface to which a target molecule is attached and to which target molecule a probe may be complexed for detection of such complexes.

[0068] As used herein, the term “unmodified,” as used with respect to a target biopolymer such as target polynucleotide of the invention, refers to a polynucleotide that lacks reactive functionalities added or incorporated into a polynucleotide during or after its synthesis, isolation, or other preparation. Generally, according to the invention, a biopolymer's reactive functionality, the addition of which modifies a biopolymer, is one that allows attachment of the biopolymer to a microarray substrate. A unmodified biopolymer, on the other hand, lacks such a functionality added for the purpose of attaching a target biopolymer to a surface directly or indirectly through a linker molecule. Stated another way, an unmodified biopolymer is one in a native state wherein the functionalities (reactive or otherwise) that are present in the molecule are native to a naturally occurring like biopolymer. Where an unmodified target biopolymer covalently attaches to a microarray slide, the unmodified biopolymer does so at functionalities typical of a naturally occurring biopolymer or a biopolymer as it is isolated from a cell. Where the unmodified biopolymer is an unmodified polynucleotide, such as RNA, DNA or PNA, the unmodified polynucleotide attaches to the substrate at functionalities typical of a naturally occurring nucleic acid base, a polynucleotide backbone, or a polypeptide backbone.

### DESCRIPTION OF THE DRAWINGS

[0069] FIG. 1 is a photograph or microarray images generated using fluoroprobes synthesized by the method of the invention from 1-5 ng total RNA from microdissected colon tumor cells.

[0070] FIGS. 2A is a photograph of microarray images generated using fluoroprobes synthesized by the method of the invention from 5 μg total RNA isolated from formalin-fixed paraffin-embedded liver tissue. FIG. 2B is a photograph of microarray images generated using fluoroprobes synthesized by the method of the invention from 5 μg total RNA isolated from fresh frozen adult liver. Probes generated from paraffin-embedded starting material were comparable in detection sensitivity to probes generated from fresh frozen tissue (compare FIG. 2A and FIG. 2B). FIG. 2C is a photographic image of a microarray analysis from a formalin-fixed paraffin-embedded colon tumor, 4 μg total cellular RNA starting material. FIG. 2D is a scatter plot of the fluorescence intensities from microarray analysis of colon tumor RNA isolated from the same patient, a fresh-frozen sample (X axis) versus a formalin-fixed paraffin-embedded sample (Y axis).

[0071] FIG. 3A is a photograph of microarrays showing hybridization of probes synthesized from breast tumor RNA. FIG. 3B shows hybridization of probes synthesized from epithelial tissue RNA pool reference sample. In general, gene expression is quantified by comparison of the intensity and wavelength emitted from each spot for test versus control samples.

[0072] FIGS. 4A, 4B, and 4C are photographs of microarrays showing successful detection of hybridized sDNA probes synthesized from various amounts of total cellular RNA starting material from an ovarian carcinoma cell line. The figures display the results of a 1-color analysis of fluorescence intensity achieved on a microarray according to the invention when the amount of total cellular RNA starting material was limited to 200 pg (FIG. 4A), 20 pg (FIG. 4B), and 2 pg (FIG. 4C).

### EXAMPLES

[0073] The following examples are offered by way of illustration and not by way of limitation. The examples are provided so as to provide those of ordinary skill in the art with a complete disclosure and description of how to make and use the compounds, compositions, and methods of the invention and are not intended to limit the scope of what the inventors regard as their invention. Efforts have been made to insure accuracy with respect to numbers used (e.g. amounts, temperature, etc.), but some experimental errors and deviation should be accounted for. Unless indicated otherwise, temperature is in degrees C. (° C.). The disclosures of all citations in the specification are expressly incorporated herein by reference.

### Example 1

### Nucleic Acid Preparation for Microarray Analysis

[0074] The invention is useful for detecting the presence of nucleic acids in any mixture of nucleic acids. The present invention finds its preferred use, however, in the detection and quantification of gene expression in tissue samples, a medium in which detection of gene expression has heretofore posed distinct challenges. The present invention solves this problem by providing a method of improving the detection limit for gene expression in tissue samples.

[0075] Collecting Cells for Control or Test Samples: Microarray analysis allows the direct comparison of cellular states between test and control samples of cells, tissue, body fluids, and the like. Such comparisons are optimized when the test or control sample comprises exclusively or substantially only the cells of interest. For example, a diseased tissue, such as cancer tissue, frequently comprises cancerous cells that have infiltrated an area or normal cells. Thus, a sample of cancerous tissue will often contain a mixture of normal and diseased cells and may also include several cell types found in the tissue or associated with the cancer, such as cells associated with the inflammatory and immune responses to cancer. Preferably, a sample comprises only those cells important to the analysis. According to the present invention, it is preferred that the test sample comprises a collection of cells collected specifically by cell type or other desired state such that contamination of the sample by cells of a different type or state are excluded.

[0076] The technique of laser-capture microdissection (LCM) is preferred for cell collection (see, for example, Emmert-Buck, M. R. et al., Science 274:998-1001 (1996); Simone, N. L. et al., Trends in Genetics 14:272-276 (1998); Glasow, A. et al., Endocrine Research 24:857-862 (1998); WO 002892 (priority date Nov. 5, 1998); Luo, L. et al., Nature Medicine 5:117-122 (1999); and Arcturus Engineering, Inc., www.arctur.com, last visited Mar. 20, 2001). LCM was developed to provide a method for obtaining pure populations of cells from specific microscopic regions of tissue sections under direct visualization (Simone, N. L. et al. supra). For the purposes of the invention and the present examples, the cells of interest were transferred to a polymer film activated by laser pulses, a technique that maintained the integrity of the RNA. DNA, and proteins of the collected cells. The transferred cells were used for the isolation of total cellular RNA for subsequent use in the preparation of control nucleic acid probes and test nucleic acid probes. The LCM device used for the examples disclosed here was from Arcturus Engineering, Inc., (Mountain View, Calif., USA).

[0077] Isolation and Purification of Nucleic Acids from Biological Samples: The nucleic acid preparation method of the invention involves a cesium chloride density gradient protocol. It is useful for collecting both RNA and DNA from tissue samples of limited size and from a variety of tissue sources including, but not limited to tumor tissue of epithelial origin. RNA obtained by this method is sufficiently pure to allow the direct synthesis of probes from the RNA and allows improved probe labeling. This method was found to particularly useful for isolating RNA from tissues such as liver or fetal heart which are rich in contaminating carbohydrates. Additionally, the method of the invention is useful for purifying commercially obtained RNAs, thereby allowing for improved probe synthesis and labeling of RNAs from commercial sources.

[0078] Purification of nucleic acids from tissue samples is provided as an example of the method of the invention and its usefulness. Tissue samples from normal tissue (or a pool of normal tissues) is designated “control tissue” or “control sample” herein. Tissue samples from a diseased tissue, such as tumor tissue, is designated “test tissue” or “test sample” herein. Unless otherwise indicated, the preparation of control and test samples is the same in the present example.

[0079] Tissue, either test or control tissue, was ground to powder in liquid nitrogen, followed by douncing 8-10 times in at least 10 volumes of lysis buffer (4M guanidine thiocyanate, 25 mM sodium citrate, 0.5% N-lauryl sarcosine) to provide a tissue lysate. For example, to approximately 100 mg of tissue, approximately 1-2 ml of lysis buffer was added. The lysate was centrifuged at 12,000 rpm in an SS34 rotor (approximately 12,100×g; Beckman Instruments, USA) for 10 min. to remove insoluble material. The clarified lysate was then layered on top of 5.7M cesium chloride/50 mM EDTA pH 8 (designated “CsCl” for convenience) at a volume-to-volume ratio of 1:2.25 CsCl:lysate.

[0080] The CsCl:lysate preparation was centrifuged at 150,000×g for at least 12 hours to sediment RNA from the suspension. For tubes compatible with a SW 55 rotor (Beckman Instruments, USA), 3.5 ml lysate was layered on 1.5 ml CsCl for a total volume of 5 ml. When a TLS 55 rotor (Beckman Instruments) was used for smaller samples of 50-200 mg tissue, 1.4 ml lysate was layered onto 600 μl CsCl and centrifuged.

[0081] The lysate was removed and retained for DNA purification. The RNA pellet was observed as a glassy precipitate at the bottom of the centrifuge tube. After removing cesium chloride solution from the centrifuge tube and washing the pellet with highly purified water, the RNA pellet was resuspended in a volume of TE (10 mM Tris, 1 mM EDTA, pH 8-8.5) sufficient, to resuspend the pellet. Resuspension may be slow, requiring 12 or more hours to resuspend large pellets in small volumes.

[0082] Resuspended RNA was extracted by standard phenol:chloroform extraction techniques. The RNA was precipitated by the addition of 0.1 volume (relative to the aqueous layer) of 3M sodium acetate and 3 volumes of ethanol. The precipitate was washed with 70% ethanol, followed by washing with 95% ethanol. The pellet was dried and resuspended in highly purified water, such as double-distilled and deionized water or the like.

[0083] Where the sample was cells in culture, the method of purifying nucleic acids was modified as follows. To cells harvested from a 10 cm culture plate or a 15 cm plate, 2 ml or 3.5 ml, respectively, of the lysis buffer was added. Lysate was collected using a syringe equipped with an 18 gauge needle. Low-speed centrifugation at 12,000 rpm in an SS34 rotor may be omitted for the preparation of cultured cell lysate. Following collection of lysate, the procedure for nucleic acid purification from cultured cells was the same as that for tissue samples.

[0084] The retained DNA-containing lysate was doubled in volume with highly purified water. Material was extracted by standard phenol:chloroform extraction techniques leaving DNA in the aqueous later. DNA was precipitated by the addition of 0.7 volume isopropanol. The precipitate was pelleted at 13,000 rpm in a SS34 rotor (Beckman Instruments), for example, and mixed with a minimum amount of TE to resuspend the pellet.

[0085] The purified and resuspended RNA and DNA are useful for the preparation of probes for microarray analysis. The ability to isolate both RNA and DNA in a highly purified from a tissue sample is particularly useful in permitting correlation and comparisons between the number of gene copies (as DNA) and the level of expression (as RNA), for example.

### Example 2

### Preparation of Microarray Probes

[0086] The protocol disclosed herein for the preparation of a microarray probe is useful to analyzing very small quantities of RNA as starting material for probe synthesis. The protocol is particularly useful to generate mixtures of cDNA probes or sDNA probes from tumor cells isolated from heterogeneous tumor tissue by laser capture microdissection, for example. The number of tumor cells thus isolated is usually quite small, yet as few as 100 cells, even 10 cells, and as few as one cell is a sufficient source of RNA for gene expression analysis due to the surprising sensitivity available using the compositions and methods of the invention. The present method is also useful for probe synthesis using RNA isolated from non-microdissected cells, but is generally, although not exclusively, most useful when the quantities of RNA are limiting. The probes generated by the method of the invention are reliably sensitive even when the amount of RNA starting material is very small. For example, the invention relates to probe synthesis from as little as 2 pg-10 ng isolated total cellular RNA, which represents approximately 20 fg-100 pg messenger RNA, an amount that is approximately 1000-fold less than currently available techniques can analyze.

[0087] According to the present invention, two variations for probe synthesis are disclosed, where the variations depend on the amount of isolated total cellular RNA available. For quantities of total RNA from 500 ng-5 μg, inclusive, a direct labeling protocol is used. For quantities of RNA as small as 500 pg-10 ng of total RNA, probes are generated by a single round of amplification by in vitro transcription. For extremely small amounts or total cellular RNA (e.g. 0.01-10 pg total cellular RNA, preferably about 1-10 pg, more preferably about 1-2 pg, equivalent to the total RNA from a single cell), the initial amplification by in vitro transcription may be performed as described, or performed for a longer incubation period (e.g. for 12 hours), or performed twice to generate sufficient material for sDNA probe or cRNA probe synthesis. For each embodiment or the invention, cDNA probe, sDNA probe, or cRNA probe synthesis involves the incorporation of fluorochromes.

[0088] Before cDNA probe, sDNA probe, or cRNA probe synthesis, the RNA may be purified by micro-CsCl centrifugation or by direct precipitation of unquantified nucleic acid. For example, these purification protocols were particularly useful when working with microdissected tissue samples.

[0089] This example discloses the use of commercially available modified fluorescent dyes (the Alexa series of fluorescent dyes, Molecular Probes, Inc., Eugene, Oreg., USA) in a 2-color or one-color microarray analysis based on cDNA probes prepared directly by reverse transcription of isolated RNA purified by the method disclosed in Example 1. Similarly, cRNA probes and sDNA probes were prepared with an intermediate step of double stranded DNA synthesis from isolated RNA, followed by transcription, then, where a sDNA probe is desired, by synthesis of a labeled DNA probe using reverse transcriptase, labeled deoxyribonucleotides, and random primers. The method of probe preparation disclosed in this example is robust and highly sensitive, allowing the user to begin with as little as 500 pg-10 ng total RNA.

[0090] Preparation of Labeled DNA Probes:

[0091] The following procedures disclose non-limiting examples of methods of preparing a detectably labeled DNA probe for use in the present invention. In each example of probe synthesis, the starting material was total cellular RNA isolated from a tissue sample. As these examples demonstrate cDNA probes were prepared from RNA with no intermediate amplification or only 1 or 2 rounds of amplification. sDNA probes were prepared by reverse transcription from unlabeled cRNA. sDNA probes were also prepared from larger amounts of starting total cellular RNA by direct second strand synthesis with label incorporation. cRNA probes were prepared from cDNA.

[0092] Problems to be Solved in Developing an Improved Method of Preparing Labeled Nucleic Acid Probes:

[0093] Detection sensitivity relies, in part, on the ability to generate a maximally labeled (“hot”) probe without exceeding the solubility limits For the DNA/chromophore complex. The solubility or the DNA/chromophore complex is affected by probe labeling density and probe length. Labeling density is defined as the number of chromophores per specified DNA fragment length. Labeling density was found as part of the invention to be correlated with total labeling efficiency, and therefore, correlated with the ratio of labeled probe to unlabeled probe. This ratio is readily estimated by probe intensity visualized on a nucleic acid sequencing gel. This technique was useful for evaluating the probes for approximate labeling density, molecular weight or fragment length. In a related observation, it was found that probe solubility was inversely correlated with labeling efficiency, i.e. as the number of fluorochromes was incorporated into a probe, its solubility decreased. Thus, the visualization of labeling efficiency on a sequencing gel also provided an indirect estimation and prediction of probe solubility.

[0094] The length and, hence the molecular weight, of the probes was controlled by mild DNase digestion. Preferably the DNase digestion is performed for a time and under conditions that yield an average probe length of less than 5 kb, more preferably in the range from 0.5 kb-2 kb, inclusive, after digestion. Gel electrophoresis may be used to evaluate the degree of probe digestion. Redigestion by DNase can he performed if the average probe length is longer than the target average length.

[0095] Probes were evaluated for labeling density on an ABI 373A DNA sequencer (Applied Biosystems, Inc., USA) or other phosphoimaging or fluorescent imaging device. The use of fluorescein- and rhodamine-related dyes was useful because the different emission wavelength of each dye allowed separate detection of the labeling density for each dye. Labeling density was estimated by correlation with ratio of labeled to unlabeled probe, such that the fluorescence intensity of the probe mixture on a sequencing gel provides an indication of the labeling density. Other dyes are, of course, useful in the method of the invention. Preferably, the dyes have emission maxima that do not directly overlap and allow the separate and quantitative detection of chromophores in a probe/microarray complex.

[0096] The solubility of a labeled probe was determined directly using a charge coupled imaging device (a “CCD imager”). Solubility was also predicted by correlation with labeling density (e.g. the ratio of labeled to unlabeled probe) because an increased amount of label incorporation increases the fluorescent intensity of the probes, but also increases insolubility. A suitable probe intensity as assessed by acrylamide gel electrophoresis on an AB1373A DNA Sequencer photon multiplier tube voltage setting of 750-780 volts) includes visible, but non-saturating, fluorescent signal (100-4000 fluorescence units by the GeneScan software package, Applied Biosystems) on loading 0.5% of 488-labeled probes and 5% of 546-labeled probes.

[0097] Detection sensitivity also relies on adjusting the stoichiometry of chrormophore and template nucleic acid to maximize probe labeling. It was found as part of the present invention that, during cDNA synthesis by reverse transcription from template RNA, that the unlabeled dNTPs of the reaction mixture should include unlabeled dUTP, instead of dTTP typically required in standard procedures. The substitution of dUTP for dTTP improves efficiency of the mRNA labeling reaction because unlabeled dUTP competes less effectively than unlabeled dTTP for incorporation by reverse transcriptase, thereby increasing the number of chromophores incorporated into a probe.

[0098] As another method of improving detection sensitivity, the present invention contemplates use of ribonuclease (RNase), rather than commonly used alkali, to degrade the parent mRNA strands. It was discovered as part or the present invention that the omission of alkali in mRNA degradation was helpful because alkali substantially decreases the fluorescence emission of dye 488, one of the chromophores useful in the invention.

[0099] Preparation of Labeled DNA Probes:

[0100] While the present example discloses a method for preparing a DNA probe from RNA, it is also contemplated that DNA probes from RNA or DNA may be prepared based on the disclosure provided herein for related or alternative applications.

[0101] According to the invention, RNA strand extension was an initial step in cDNA probe synthesis. A basic technique for RNA strand extension is available from differential display reverse transcriptase PCR (DDRT-PCR). In that technique, total cellular RNA is primed for First strand reverse transcription with an anchoring primer composed of oligo-dT and any two of the four deoxynucleotides (DDRT-PCR; see, Liang and Pardee, Science. 257:967-971 (1992) and Russell, D. W. and Thigpen, A. E. , U.S. Pat. No. 5,861,248, issued Jan. 19, 1999). In one embodiment or the present invention, RNA strand extension uses an oligo-dTVN primer for extension by a reverse transcriptase, such as Moloney Murine Leukemia Virus reverse transcriptase (MMLV-RT) in the presence of dATP, dGTP, dCTP, dUTP, and chromophore-labeled dUTP, and other components as disclosed, infra. The present invention differs from DDRT-PCR, however, in that no amplification or only one round of amplification of the RNA or cDNA is performed. The methods disclosed herein improve detection sensitivity to such a surprising extent that detection and quantitation of gene expression may be performed on very small mRNA samples without the need for PCR-based or additional T7-based amplification or with only one round of linear amplification. As a result, the methods are rapid, convenient, and sensitive relative to existing methods.

[0102] Preparation of sDNA Probe

[0103] Detectably labeled sDNA probes were generated from 1 pg-10 ng total RNA. Because of the small amount of starting material, the present embodiment involves a single round of amplification prior to incorporation of chromophore as disclosed in the following procedure. The term “sDNA” refers to DNA generated from total cellular RNA by first and second strand cDNA synthesis, followed by one round (or optionally two rounds) of cRNA synthesis to amplify the nucleic acids sequences, followed by sDNA synthesis by reverse transcription of the cRNA in the presence of a detectably labeled dNTP.

[0104] First Strand Synthesis: Into each sample reaction vial was added: 10 ng purified total cellular RNA (isolated according to Example 1); 2 μg oligo-dTVN-T7 primer (oligo-dT refers to an oligomer of 18 dT residues complementary to poly-A tails of mRNA;V refers to nucleotides dA, dC, and dG; N refers to dA, dC, dG, and dT, and “T7” indicates that the oligo comprises the T7 promoter sequence, 5′-GAATTCTAATCGACTCACTATAGT₁₈-3′ (SEQ ID NO:1), at the 5′ end of the oligo); and 0.8 μl dNTP mix (500 μM each of dATP, dGTP, dCTP, and dTTP). The samples were heated to 65° C. for 3 min., cooled on ice, and left at room temperature for 10 min to anneal the primer to mRNA in the total cellular RNA mixture. To each sample was added 4 μl 5× reaction buffer (250 mM Tris-HCl, pH 8.3, 375 mM KCl, 15 mM MgCl₁); 0.5 μl RNase Block; 1 μl Superscript II; and 200 U Superscript reverse transcriptase (Life Technologies, Madison, Wis., USA) in a final volume of 20 μl. The samples were allowed to incubate at 42° C. for 1 hour to extend the first cDNA strand.

[0105] Second Strand Synthesis: To each sample vial from the First Strand Synthesis reaction, the following reagents were added: 91 μl DEPC water; 30 μl 5× reaction buffer, supra; 3 μl 10 mM dNTPs; 1 μl E. coli DNA ligase; 4 μl E. coli DNA polymerase; and 1 μl E. coli RNaseH. The samples were incubated at 16° C. for 2 hours.

[0106] In a related procedure, the reaction volume was reduced and the Klenow fragment of DNA polymerase I is used for an improved yield of double stranded DNA and subsequently sDNA probe. To each sample vial from the First Strand Synthesis reaction, the following reagents were added: 18.1 μl DEPC water; 10 μl 5× second strand buffer (Life Technologies); 1 μl 10 mM dNTPs; 0.3 μl E. coli DNA ligase (10 U/μl); 0.3 μl E. Coli DNA polymerase I Klenow fragment (50 U/μl); and 0.3 μl E. coli RNaseH (2 U/μl), for a total volume of 50 μl. The samples were incubated at 12° C. for 2 hours.

[0107] The resultant double stranded cDNA was partially purified by phenol:chloroform extraction. The cDNA was then precipitated by the addition of 85 μl 7.5 M ammonium acetate and 650 μl cold ethanol (approximately 0° C.) and 1 μl linear polyacrylamide, a nucleic acid carrier for precipitation (Ambion, Inc.). For the smaller volume reaction disclose above, the volumes were adjusted such that 29 μl 7.5 M ammonium acetate and 220 μl cold ethanol (approximately 0° C.) and 1 μl linear polyacrylamide were added. A cDNA pellet was collected, washed and dried by standard techniques.

[0108] Amplification by Transcription from cDNA: A single round of linear amplification is preferred when only small amounts of total cellular are available. Amplification is achieved by transcribing mRNA from the double stranded cDNA generated by first and second strand synthesis, supra. When only very small quantities of total cellular RNA were available from biological samples, (e.g. 1-20 pg of total RNA), the reaction was optionally followed as described, or the transcription reaction was allowed to continue overnight, or two rounds of linear amplification were performed. The following procedure describes a single round of linear amplification.

[0109] The double stranded cDNA was resuspended in 20 μl 1× T7 Transcription Reaction Buffer (Ambion, Austin, Tex., USA; T7 Megascript™ Kit, catalog no. 1337). To the resuspended cDNA were added the following components: 8 μl DEPC water; 2 μl each of 75 μM solutions of ATP, GTP, CTP, UTP; 2 μl 10× Buffer (Megascript™ Kit, Ambion, Inc.); 2 μl 10× T7 RNA polymerase. The samples were incubated at 37° C. for 5 hours. Overnight incubation under these conditions increased the yield. The reactions were stopped by the addition of 15 μl sodium acetate stop buffer (7.5 M sodium acetate), 115 μl DEPC water and extraction with phenol:chloroform. The nucleic acids were precipitated with an equal volume of isopropanol.

[0110] Incorporation of Fluorochromophore: Label may be incorporated into cDNA synthesized directly from mRNA present in total cellular RNA if 500 ng-5 μg or more is available. For direct cDNA synthesis from total cellular RNA, the following fluorochromophore incorporation procedure is useful. When less than 500 ng total cellular RNA was available, linear amplification as disclosed, supra, is preferred.

[0111] For probe synthesis after amplification, 5 ng-100 ng of cRNA pellet was suspended in 1× First Strand Reaction Buffer, supra. To the resuspended nucleic acids were added the following components: 1 μg random hexamers; 0.8 μl nucleotide mix (10 mM each dATP, dGTP, dCTP, and 7 mM dUTP); and DEPC water to bring the volume to 13.5 μl. The nucleic acids were denatured and the hexamers annealed by placing the samples at 65° C. for 3 min., chilling on ice, and then annealing at room temperature for 10 min. Optionally, from 100 ng to 10 μg random hexamers are added to the reaction.

[0112] Next, fluorochromophore was incorporated as follows: To each vial were added the following: 4 μl RNase Block; either dUTP-fluorophore (6-12 μM Alexa 546-dUTP or 25-40 μM Alexa 488-dUTP); and 1 μl MMLV reverse transcriptase (200 U). The reaction was incubated for 1 hour at 42° C. in the dark. The sDNA probes generated from control and test samples were labeled with different, detectably distinguishable chromophores. For example, the control probes were labeled with dye 546 and test probes were labeled with dye 488.

[0113] The parental RNA strands were removed from the sDNA probe mixture by RNase digestion according to the following protocol. Each reaction vial was heated to 95° C. for 1 min., followed by chilling on ice to denature the DNA and RNA strands. To each reaction vial, was added 1 μl diluted RNase (500 μg/ml diluted 1:50 in water; Boehringer-Mannheim). The RNase digestion was allowed to continue for 15 min. at 37° C. The reaction vials were then placed on ice until the next step could be performed.

[0114] As an aspect of the invention, the average sDNA probe length was controlled by the stoichiometry of random hexamer primer to cRNA such that the average probe length was 0.5-2 kb. As the ratio or random primers to cRNA increased, the average probe length (related to average probe molecular weight) decreased.

[0115] Preparation of Labeled cDNA Probe Directly from Total Cellular RNA In another aspect, the invention involves a method of preparing labeled cDNA probes directly from total cellular RNA by incorporating detectably labeled dNTPs in the reaction mixture for first strand synthesis according to the first strand synthesis procedure disclosed, supra.

[0116] According to this method, first strand cDNA synthesis with direct label incorporation was performed as follows. Into each sample reaction vial was added: 1-10 μg purified total cellular RNA (isolated according to Example 1); 2 μg oligo-dTVN-T7 primer (oligo-dT refers to an oligomer of 18 dT residues complementary to poly-A tails of mRNA;V refers to nucleotides dA, dC, and dG; N refers to dA, dC, dG, and dT, and “T7” indicates that the oligo comprises the T7 promoter sequence. 5′-GAATTCTAATCGACTCACTATAGT₁₈-3′ (SEQ ID NO:1), at the 5′ end of the oligo); and 0.8 μl dNTP mix (500 μM each of dATP, dGTP, dCTP, and dTTP). The samples were heated to 65 C for 3 min., cooled on ice, and left at room temperature for 10 min to anneal the primer to mRNA in the total cellular RNA mixture. To each sample was added 4 μl 5× reaction buffer (250 mM Tris-HCl. pH 8.3, 375 mM KCl, 15 mM MgCl₂); 0.5 μl RNase Block (Stratagene); 1 μl Superscript II; and 200 U Superscript reverse transcriptase (Life Technologies. Madison, Wis., USA) in a final volume of 20 μl. The samples were allowed to incubate at 42° C. for 1 hour to extend the first cDNA strand.

[0117] The average cDNA probe length was next adjusted with limited Dnase digestion. The cDNA reaction volume in each vial was adjusted to 50 μl with 10 mM MgCl2 and chilled on ice. A dilute DNase I solution was prepared comprising 1 part DNase I (10,000 U/ml; Boehringer-Mannheim) in 5000 parts 20 mM Tris buffer, pH 8.0. The final dilution of DNase I was approximately 2 U/ml. A 2 μl aliquot of diluted DNase I (2 U/ml) was added to each vial containing cDNA probe labeled with dye 546, and a 4 μl aliquot of diluted DNase I was added to vials containing cDNA probe labeled with dye 488. The DNase conditions may be varied as necessary to adjust for different chromophores and input cDNA. The vials were incubated at 12° C. for 30 min. Next 5 μl 250 mM EDTA pH 8.0 was added to each vial. DNase I was inactivated by heating each vial to 65° C. for 15 min. The labeled cDNA probe was separated from the proteins by standard phenol:chloroform extraction followed by purification of the aqueous layer over a G50 spin column (Pharmacia). To each aqueous eluate from the spin columns was added a 3 μl aliquot of a 10×SSC solution. The cDNA probe pellet was dried and resuspended in a 6 μl aliquot of 50:50 formamide:water solution for at least 3-4 hours at room temperature in the dark. Once a flurochromophore is incorporated into a probe, the probe is preferably kept in the dark at 0° C. or below until ready to use. The resuspended labeled cDNA probe is useful for hybridization to microarrays as disclosed herein.

[0118] Preparation of Labeled sDNA Probe Directly from First Strand cDNA In another aspect, the invention involves a method of preparing labeled sDNA probes directly from cDNA without intermediate cRNA synthesis (without amplification). The probes are prepared by second strand sDNA synthesis with simultaneous incorporation of label. Average probe length is controlled by the use of random primers in the final labeling step. The method is similar to the method for preparation of labeled cDNA probes with the following modifications. The probe labeling involves double stranded cDNA preparation as disclosed, supra, followed by labeling of sense strand DNA (sDNA) using fluorescent deoxyribonucleotides and random primers. The unlabeled first strand DNA is synthesized using a biotin-labeled primer and can be removed, to avoid competition in hybridization, using streptavidin. A non-limiting example of the method follows.

[0119] RNA isolation from samples: RNA was prepared from frozen tissue, samples isolated by laser capture microdissection (LCM), or from tissue stored in RNAlater reagent (Ambion, Austin, Tex., or Qiagen, Valencia, Calif.). Samples were homogenized with a rotor-stator tissue homogenizer (IKA Labortechnik, Staufen, Germany, or Brinkman Instruments, Westbury, N.Y.) in RLT buffer according to the RNeasy Mini or Midi RNA purification kits (Qiagen, Valencia, Calif.). Purified RNA was quantified by measuring optical absorption at 260 nm in a UV spectrophotometer (Shimadzu, Pleasanton, Calif.). For RNA purified from small amounts of tissue ( <1 μg of tissue, or LCM tissue sample) the RiboGreen RNA quantitation assay (Molecular Probes, Eugene, Oreg.) was used with a fluorescence microplate reader (Molecular Devices, Sunnyvale, Calif.).

[0120] First Strand cDNA Synthesis: First strand cDNA was synthesized from 0.5-5 μg of total RNA using Superscript reverse transcriptase as described by the manufacturer (Life Technologies, Rockville, Md.) using 5′-biotin labeled (dT)₁₈VN, where V=G, A, or C and N=G, A, T, or C. RNA was then digested in 10 ng of Dnase-free RNase A (Roche Molecular Biochemicals, Indianapolis, Ind.) 37° C. for 15 minutes. The reaction was extracted with water saturated phenol:chloroform:isoamylalcohol (49:49:2). Linear acrylamide (Ambion, Austin. Tex.) was added to a final concentration of 18 ng/ml. One-tenth volume of 3 M sodium acetate pH 4.8 was added and cDNA was precipitated by the addition of an equal volume of ice cold isopropanol. Samples were incubated at −20° C. for 20 minutes, centrifuged at 14,000 rpm for 20 minutes at 4° C., and the supernatant was aspirated from the clear pellet which was vacuum dried.

[0121] Second Strand cDNA Synthesis of Incorporation of Fluorochrome: Second strand cDNA was synthesized in 20 μl reaction using 2 Units of the Klenow fragment of DNA polymerase I (Life Technologies, Rockville, Md.), 1 to 50 μg of p(dN)₆ (Life Technologies, Rockville, Md.) or other random sequence oligonucleotide of 7 to 9 bases, 100 μM each of dGTP, dCTP, and dATP, and a combination of dTTP and Alexa488-dUTP (Molecular Probes, Eugene, Oreg.) to a final concentration of 100 mM. The dTTP to Alexa488-dUTP ratio may vary from 100:1 dTTP to Alexa488-dUTP to 100% Alexa488-dUTP. Alexa 546-dUTP and Alexa 594-dUTP may also be used with this protocol. NaCl may be added in addition to the standard working concentration of 50 mM, increasing in concentration up to approximately 150 mM. The reaction included reaction buffer components supplied by the enzyme supplier (Life Technologies, Rockville, Md.). Reactions were initiated by first heating the reaction mixture to 95° C. for 5 minutes, then quickly chilling it on ice, followed by the addition of Klenow enzyme. The reaction was incubated at temperatures ranging from 12° C. to 37° C. for 1 to 18 hours. Reactions were stopped by addition of EDTA to 25 mM, heated at 95° C. for 5 minutes and quickly chilled on ice. The biotin-tagged (−) strand cDNA is separated from random-primed (+)-strand labeled cDNA using streptavidin-para magnetic particles (SA-PMP) (Promega, Madison, Wis.). SA-PMPs were prepared by washing 3 times in 0.5×SSC and once in 10 mM Tris, 1 mM EDTA, pH 7.5. The labeled cDNA reaction was incubated with the SA-PMPs for 10 minutes at room temperature, and the supernatant was removed from the SA-PMPs on a magnetic stand. The resulting labelled (+) strand cDNA was extracted with water saturated phenol:chloroform:isoamylalcohol (49:49:2), purified over a G-50 spin column (Pharmacia), and vacuum dried before using in a hybridization reaction.

[0122] Preparation of Labeled cRNA probes: Preparation of labeled cRNA probes is preformed, according to the invention, by direct incorporation of fluorochromophore-labeled ribonucleotides into cRNA followed by adjustment of average probe length. The method is similar to the method for preparation of labeled cDNA probes with the following modifications. The cRNA probe synthesis begins from the step of double stranded cDNA preparation as disclosed, supra.

[0123] Double stranded cDNA prepared was resuspended in 20 μl 1× T7 Transcription Reaction Buffer (Ambion, Austin, Tex., USA; T7 Megascript™ Kit, catalog no. 1337). To the resuspended cDNA were added the following components: 8 μl DEPC water; 2 μl each of 3.75 mM solutions of ATP, GTP, CTP, UTP; 2 μl 10× Buffer (Megascrip™ Kit, Ambion, Inc.); 2 μl 10× T7 RNA polymerase. To each vial were added the following: 4 μl RNase Block; either UTP-fluorophore (60 μM Alexa 546-UTP (preferably in the range of 30-120 μM, inclusive) or 300 μM Alexa 488-UTP (preferably in the range of 200-400 μM, inclusive)). The samples were incubated at 37° C. for 5 hours, or overnight for further improvements in yield. The reactions were stopped by the addition of 15 μl sodium acetate stop buffer (7.5 M sodium acetate), 115 μl DEPC water and extraction with phenol:chloroform. The nucleic acids were precipitated with an equal volume of isopropanol. Using this, procedure, the cRNA probes were generated from control and test samples and were labeled with different, detectably distinguishable chromophores. For example, the control probes were labeled with dye 546 and test probes were labeled with dye 488.

[0124] The preferred average cRNA probe length was from 0.5 kb to and including 3 kb. The average probe length and labeling density of the cRNA probes was estimated by observing the probes on a sequencing gel such as an ABI 373A gel (Applied Biosystems, USA). The labeling density was estimated according to an observed correlation between an increase in labeling density and the ratio of labeled to unlabeled cRNA probe.

[0125] If it was determined that the average length should be reduced, the labeled cRNA probe length was adjusted by resuspending the precipitated, labeled cRNA probes in 40 mM tris-acetate, pH 8.1. 100 mM potassium acetate, 30 mM magnesium acetate. The resuspended, labeled cRNA probes were incubated at 70° C. for 10 min. Optionally, mild RNase digestion may be used to decrease the average length of the cRNA probes. It is understood that reaction conditions may vary and are readily adjusted depending on the beginning average probe length and label density. Once a flurochromophore is incorporated into a probe, the probe is preferably kept in the dark at 0° C. or below until ready to use. The resuspended labeled cDNA probe is useful ror hybridization to microarrays according to the invention.

[0126] The preferred average DNA probe, sDNA probe, or cRNA probe length was from 0.5 kb to and including 3 kb, preferably from 0.5 kb to and including about 2 kb. The average probe length and labeling density of the sDNA probes was estimated by observing the probes on a sequencing gel such as an ABI 373A gel (Applied Biosystems, USA). The labeling density was estimated according to an observed correlation between an increase in labeling density and the ratio of labeled to unlabeled probe. The stoichiometry of random hexamers to cRNA is the preferred method for controlling the average sDNA probe length. The average length of cDNA probes is preferably adjusted by mild Dnase digestion as disclosed herein.

[0127] Design of Controls for Microarray Analysis: In the present examples, carcinomas, cancers of epithelial tissue, were studied for gene expression relative to nonconcerous tissue. For this purpose, matched noncancerous tissue (i.e. “normal” tissue) is of limited availability. A “universal” epithelial control was prepared by pooling noncancerous tissues of epithelial origin, including liver, kidney, and lung. RNA isolated from the pooled tissue represents a mixture of expressed gene products from these tissues. The pooled control referred to hereinafter as the “control” sample, was an effective control for relative gene expression studies of tumor tissue and tumorigenic cell lines. Microarray hybridization experiments using the pooled control samples generated a linear plot in a 2-color analysis as disclosed herein. Because the test and control samples have many genes expressed at similar quantitative levels, a plot of intensity data for all of the target molecules that formed complexes with the control and test probes yielded a linear clustering of the data. The slope of the line fitted to these data in a 2-color analysis was then used to normalize the ratios of test to control within each experiment. The normalized ratios from various experiments were then compared and used to identify clustering of gene expression, and genes differentially expressed in diseased tissue versus normal tissue across many different tissue samples. Thus, the pooled “universal” control sample not only allowed effective relative gene expression determinations in a simple 2-sample comparison, it also allowed multi-sample comparisons across several experiments.

### Example 3

### Microarray Slide Preparation

[0128] Activated glass slides used for attachment of target molecule polynucleotides in nucleic acid microarray preparation are commonly treated with polylysine (see, for example, U.S. Pat. No. 5,807,522) or organosilane (See, for example, WO 01/06011; WO 00/40593; U.S. Pat. No. 5,760,130; and Weiler et al., Nucleic Acids Research 25(14):2792-2799 (1997)). For the purposes of the present invention, organosilane-based treatment of the glass slide was preferred because it allowed specific nucleic acid sequence end attachment via a covalently attached primary amine on the nucleic acid as disclosed herein. Such specific attachment is advantageous for specific positioning of nucleic acid sequences on a microarray slide, thereby ensuring attachment of the nucleic acid while rendering it free to hybridize efficiently with complementary sequences in a probe.

[0129] It was discovered as part of the present invention that even unmodified nucleic acids (such as target DNA) can attach to a glass slide treated with 3-aminopropyltriethoxysilane (APS) followed by attachment of phenylene diisothiocyanate, suggesting that the nucleic acids may also be attaching a functional group on unmodified DNA (for example, at the 5′ end of an unmodified promer used to amplify nucleic acids for arraying by PCR, or amines on unmodified DNA bases). Thus, the invention involves the attachment of unmodified polynucleotides to an activated microarray slide of the invention.

[0130] The present inventors also discovered that the solvent used for silane treatment of glass slides has a marked affect on the fluorescent background observed in microarray analysis. Acetone, the commonly used solvent for dissolving silane during glass slide treatment, caused a high and/or non-uniform fluorescent background during imaging. Methanol is occasionally used as a solvent for silanization (see, for example, <http://sgio2.biotec.psu.edu/protocols/silanize.html> (last visited Mar. 13, 2001). Methanol is disadvantageous because water present in methanol quenches the silanizing reaction and limits efficient coating of the a glass microarray slide. For examples of other procedures for silanization in solvents other than toluene, see, WO 01/06011; WO 00/40593; U.S. Pat. No. 5,760,130; and Weiler et al., (1997), supra). Because efficient silanization and low background is preferred for maximum signal-to-noise ratio and highest sensitivity, an alternative solvent was sought. Toluene was found to be a superior solvent for silane treatment because longer glass treatment could be used to ensure optimal coating while avoiding high fluorescent background. Acetone is still useful in the glass slide treatment method of the invention, but its use is preferably confined to drying steps where contact with acetone is of relatively short duration.

[0131] Preparation of Activated Microarray Slides:

[0132] According to the method of the invention, glass slides were treated using the following protocol to prepare them for use in making nucleic acid microarray slides.

[0133] Cleaning Glass Slides: Glass microscope slides (standard size) were used for the present experiment. Throughout the procedure, the slides were handled with solvent-proof gloved hands. Thirty slides were loaded onto a clean metal rack and the rack was lowered in a clean ultrasonic cleaner chamber filled with 1% Liquinox™ (Alconox, NY N.Y.) in highly purified water, such as by reverse osmosis (designated “SQ water”; MilliQ™ System, Millipore Corp., Bedford, Mass.) The Liquinox solution was heated to approximately 50 C in the ultrasonic cleaner prior to immersing the slides. The slides were cleaned ultrasonically for 30 min. at 50 C. The same solution of Liquinox may be used to clean approximately 4 batches of 30 slides per batch. After cleaning, the slides were transferred to a plastic container filled with deionized water. The plastic container is preferably used only for rinsing cleaned slides to avoid contamination or the slides with extraneous material. The slides were rinsed three times with running deionized water and then placed on a shaker. The rinsing and shaking steps were repeated six times to ensure thorough rinsing. The final rinse was with SQ water. The slides were stored in SQ water until use.

[0134] In a preferred cleaning method according to the invention, slides were loaded in glass racks, 20 slides per rack, and cleaned in a clean ultrsonic cleaner chamber filled with 3% GLPC-Acid™ in highly purified water, such as by reverse osmosis (designated “SQ water,” MilliQ™ System, Millipore Corp., Bedford, Mass.), for 20 minutes at 65° C. After cleaning, the slides were rinsed thoroughly with deionized water. The slides were then placed in an ultrasonic cleaner chamber containing 0.5% sodium hydroxide, 50% ethanol and treated for 10 minutes at 65° C. The slides were rinsed very thoroughly with deionized water and the final rinse was with SQ water. The slides were stored in SQ water until use the next day.

[0135] All subsequent procedures for slide silanization were performed in a well-ventilated fume hood.

[0136] Drying Slides: The clean slides were transferred in the metal rack to a glass chamber. The slides were covered with acetone, shaken briefly, and removed from the acetone. The slides are allowed to drain and then dry in the fume hood. The slides were protected from exposure to dusty air that may be drawn into the fume hood by placing the slides behind the glass chamber in the hood and/or placing them back in the glass chamber after the acetone is removed and the chamber allowed to dry. The slides remained in the glass chamber until dry and free of water or acetone because these solvents are problematic: water interferes with silanization and acetone causes high fluorescent background.

[0137] Silanizing Glass Slides: Screw-cap Coplin staining jars were cleaned and dried completely. Preferably drying is performed in a drying oven. The clean glass slides were transferred into the dry staining jars using gloved hands and forceps by handling the slides only at the corners. A solution of 10% 3-aminopropyltriethoxysilane in toluene (substantially water-free as purchased from Burdick and Jackson) was prepared by adding the silane to the toluene and swirling to mix. Immediately after mixing, the silane solution was poured over the slides in each jar. Approximately 550 ml silane solution filled 6 jars. The jars were quickly covered with the screw-caps such that air and moisture were excluded from each jar to avoid precipitation of silane polymers on the slides. The slides were silanized overnight.

[0138] In a preferred method of silanizing glass slides according to the invention, a solution of 2% 3-aminopropyltriethoxysilane in toluene (reagent grade) was prepared by adding the silane to the toluene and swirling to mix. Immediately after mixing, the silane solution was poured over the slides in each glass chamber. The glass chambers were completely filled to the top edge and a lid was placed on top. The slides were silanized 14 hours at room temperature. Preferably, the 2% silanizing procedure is applied to glass slides cleaned in 0.5% NaOH, 5% ethanol (as disclosed supra).

[0139] Washing Silanized Slides: Following silanization, slides were washed by the following procedure. Glass washing chambers containing slide racks were filled with toluene. A glass chamber that holds 10 slides is filled with 250 ml toluene and a chamber that holds 20 slides requires approximately 400 ml toluene. The silanized slides were transferred from the silanization solution to racks submerged in toluene in the glass chambers using forceps to handle the slides only at the corners and without allowing the slides to dry during the transfer. In another washing procedure and at the end of the silanization period, the silanization chamber was emptied and filled with toluene such that the rack of slides was covered.

[0140] At this point in either of these washing procedures, a clean glass lid was placed on top of the chamber and the chamber was agitated for 2-6 min. The glass lid was then removed and inverted on the counter top to provide a platform on which the rack of washed slides were placed. The toluene was discarded from the chamber. The toluene wash was repeated twice. The slides were not allowed to dry during the wash procedures.

[0141] The third toluene wash was discarded, the chamber drained, and methanol was added to the chamber. Slides were submerged in the methanol and agitated for approximately 5 min. Slides were washed twice with agitation in SQ water for 5 min per wash. The slides were then washed twice in methanol ror approximately 4-5 min. with agitation.

[0142] As the final wash step, the slides were rinsed with acetone for 1 min to speed drying. The slides were allowed to dry completely in the fume hood. The slides were protected from dust by placing them in the empty glass chambers used for the wash steps. At this stage, the slides were stable for approximately one hour. In another method following the acetone rinse, slides were rinsed in dimethylformamide (DMF). The DMF was then drained from the chamber. After these wash procedures, the slides were prepared for attachment of a bifunctional linker reagent.

[0143] PDITC Attachment to Silanized Slides: The surface of the silanized slides was next cross-linked using 1,4-phenylene diisothiocyanate (PDITC), a bifunctional cross-linking agent (see Greg T. Hermanson, Bioconjugate Techniques, Academic Press (1996)) capable of reacting with silane on the glass slide at one end, and with amino-derivatized microarray DNA at the other end. Microarray DNA is thus firmly attached to the glass surface. The PDITC linkage is water sensitive, however. As a result, the slides must remain free of water until after attachment of the target molecule, such as a target polynucleotide.

[0144] The PDITC solution was prepared as follows. To a solution of 90% dimethyl formamide (DMF) and 10% pyridine, an appropriate amount of solid PDITC was added to provide a 0.20-0.25% PDITC concentration and, as expected, the solution was yellow. Due its reactivity, solid PDITC was handled quickly and stored under argon.

[0145] The PDITC solution was poured over the silanized slides, still in the glass chambers in the fume hood, and the chambers were completely filled. The glass lids were placed on the chambers and each chamber was covered with foil to block exposure to light. The slides were incubated in PDITC for 2 hours.

[0146] Following incubation, the PDITC solution was removed. DMF was added to the chambers and the slides were agitated for 3-5 min. The DMF wash was repeated twice more with agitation for approximately 5 min per wash.

[0147] The slides were then washed twice with methanol for 3-5 min. with agitation. The slides were not left in methanol for longer than 5 min. because traces of water in methanol could react with the PDITC. The slides were washed 3 times with agitation in acetone for 3-5 min. per wash. The slides were then dried completely in the fume hood, protected from dust. The PDITC-treated slides were then stored in a dry cabinet. The slides are stable under these conditions for at least 3 months.

### Example 4

### Attaching Target Molecules to an Activated Microarray Slide

[0148] It is understood that microarrays may be prepared by the user or purchased commercially. Descriptions or microarrays on glass slides are available in, for example, U.S. Pat. No. 6,040,138. Generally, a DNA microarray on a glass slide contains at least 100, preferably at least 400 or more DNA samples of at least partially known sequence in known locations on the slide at a density of at least 60 oligonucleotide sequences per square centimeter. The microarray sequences may be oligonucleotides of 5-100 nucleotides in length, or the sequences may be polynucleotides from 50 nt to 10 kb in length, or they may be full length gene sequences. A sufficient portion of each sequence must be known so that it is distinguishable from the other sequences, and it must be long enough to hybridize to a labeled probe under the conditions used.

[0149] Preparation of Target Nucleic Acid Sequences:

[0150] In this example, nucleic acid sequences of interest (“target sequences,” “target polynucleotides,” or “targets”) were generated from full length or partial cDNA clones. Optionally, a target was cloned into a vector for ease of manipulation. The target sequence (i.e. non-vector nucleic acid sequence of interest) was amplified by the polymerase chain reaction (PCR) using “Klentaq GC melt” DNA polymerase (Clontech). This enzyme provided a high success rate of amplifying DNA inserts, with uniform yields, across a range or templates that varied in both length (0.25-4 kb) and nucleotide composition.

[0151] As disclosed herein, an unmodified polynucleotide attaches directly to an activated glass slide prepared by silanizing with an organosilane in toluene, followed by reaction with a multifunctional linker reagent that is capable of reacting with the unmodified polynucleotide. As the examples herein disclose, the organosilane may be APS and the multifunctional linker reagent may be PDITC.

[0152] Alternatively, the target molecule may be modified by incorporation of a reactive group in the target molecule, which reactive group is reactive with a functionality on the multifunctional linker reagent of the activated microarray slide of the invention. According to this alternative method of the invention and simultaneous with amplification of target sequences, the amplified targets were modified to comprise a linker for covalent attachment to a solid support of a microarray. To accomplish simultaneous amplification and modification, PCR primers had at least two features. First, the PCR primers were complementary to the vector sequences into which the target DNA was inserted, thereby ensuring amplification of the complete target sequence. Further, the primer from which the modified single strand target DNA would be generated comprised a reactive moiety: a primary amine linked to the primer's 5′ end via a linker, preferably an alkyl linker, such as a —(CH₂)₆— linker. For the purpose of this example, such a primer had the following general structure: 5′ NH₂—(CH₂)₆-dNx 3′, where NH₂ is a primary amine group, (CH₂)₆ is a methylene linker, and dNx is a nucleotide sequence, preferably an oligonucleotide sequence (DNA in this example), complementary to a portion of the vector into which the target DNA was inserted (primers were synthesized at Genentech, Inc. So. San Francisco, Calif., USA). Preferably, the dNx sequence hybridizes to a vector sequence near the target insert such that enzyme-driven elongation of the primer into the target sequence using two vector-specific primers that flank the target sequences. Nucleic acid synthesis resulted in formation of a double stranded nucleic acid sequence complementary to the target sequence, wherein the complementary region is at least 10 nucleotide bases is length. Thus, following PCR amplification, each target sequence comprised a primary amino group on its 5′ end, which amino group was capable of reacting with a reactive group on an activated slide. For example, as disclosed herein by a non-limiting example, a primary amine incorporated into a polynucleotide allows immobilization of the polynucleotide on an activated glass slide. According to the invention, a glass slide is activated by silanizing in toluene with a organosilane that is then reacted with a multifunctional linker reagent. The multifunctional linker reagent is reactive with both the organosilane on the surface of the glass and with a primary amine of a modified polynucleotide as disclosed above.

[0153] Prior to immobilization on an activated slide, PCR-amplified double stranded target DNA sequences were purified using glass-fiber filters (Qiagen, Valencia, Calif.). A portion of the purified sequences was analyzed by agarose gel electrophoresis for correct molecular weight, purity (e.g. a single band representing a single product and not a mixture of clones or genes) and approximate yield of DNA (estimated by fluorescent staining with ethidium bromide following standard procedures).

[0154] The primary amine-modified target sequences were resuspended in an arraying buffer (500 mM sodium chloride, 100 mM sodium borate, pH 9.3, which promotes reaction between the primary amine of the modified target DNA and the PDITC-derivatized, silanized glass surface, resulting in covalent attachment of the target DNA to the glass slide. The slides were ready for use according to the invention, increased attachment and improved detection intensity was achieved when the slides were allowed to remain at ambient temperature and humidity in the dark overnight, such as for approximately 10-16 hours. A concentration of modified target sequence of at least 0.1 μg/μl provided successful covalent attachment to the activated glass slides, good spot morphology, and a sufficient number of covalently attached target sequences such that they were in excess relative to fluorescently labeled cDNA probes applied during subsequent hybridization reactions. This permitted quantitative measurement of the absolute fluorescent signals obtained after probe hybridization.

[0155] In this example, a two-step protocol was used to attach nucleic acids, such as gene sequences, to the silanized, PDITC-treated glass slides prepared according to the present invention. It is understood that fewer steps or more steps may be used as long as any silanizing step is performed in toluene in the absence of acetone or an an alcohol according to the present invention.

[0156] As disclosed, supra, the slides were first silanized with 3-aminopropyltriethoxysilane (APS) in toluene. The slides were then treated with PDITC (1,4-phenylene diisothiocyanate), a multifunctional linker reagent which contains two amine-reactive isothiocyanate groups. One of the isothiocyanate groups reacts with the amine group or the organosilane. The second isothiocyanate group is available to react with a primary amine present on the 5′ ends of the modified target DNA (see Example 1), thereby providing the means of attaching the target DNA to the glass slide during spotting of the DNA onto the microarray. After attaching the modified target sequences, the slides were washed once in water containing 0.2% SDS, then washed three times in SQ water, and finally dipped in ethanol and dried. Slides cleaned, silanized, and PDITC-treated according to the method of the invention were superior substrates for nucleic acid microarrays because fluorescent background was minimized, and hybridization was enhanced by minimizing over-attachment of the arrayed target DNA, thereby providing a surprising increase in detection levels over previous methods.

[0157] Microarrays Comprising Single Stranded Target Oligonucleotides

[0158] Improved microarrays comprising single stranded target oligonucleotides are encompassed by the present invention. A non-limiting example of the arrays and a method of making them follows.

[0159] Single stranded target DNA for array fabrication was synthesized by standard solid-phase methods with a 3′-C7 amino linker (Glenn Research, Sterling, Va.) with or without hexethyleneglycol spacers (S18) (Glenn Research, Sterling, Va.) incorporated between the 3′-end of the synthetic DNA and the C7 linker.

[0160] Single stranded DNA molecules, such as chemically synthesized target oligonucleotides of approximately 50 to 100 nucleotides in length were immobilized onto activated microarray slides of the invention (e.g. aminosilane in toluene/PDITC-treated glass) by standard microarray printing techniques. The printing solution comprised oligonucleotides at a concentration of up to 10 μM in 0.1 M borate, 0.5 M NaCl, pH 9.3. The slides were dried overnight at 20° C. and ambient room humidity. It was discovered as part of the present invention that drying overnight generated microarrays capable of providing an increased fluorescent signal when hybridized with polynucleotide probes of the invention.

[0161] Improved detection signal was demonstrated by hybridizing a complementary fluorescein-labeled 100 mer single strand DNA fragment to the single stranded target oligonucleotide DNA arrays as disclosed, supra, revealed that hybridization signal intensity was dependent on immobilized DNA length, with longer DNA strands providing a stronger signal. In addition, varying the number of S18 repeats from 0 to 6 revealed increasing signal intensity with increasing tether length. The combination of a 100 nucleotide single stranded target DNA molecule with 6-S18 repeats and a C7 amino linker provided highest hybridization signal intensity. Accordingly, microarrays of the invention comprising single stranded target DNA oligonucleotides are improved when the distance of the oligonucleotide from the solid surface and DNA chain length are increased.

[0162] Spotting Target Molecules onto Activated Slide

[0163] Target DNA (modified or unmodified) in 5-10 μl 100 mM sodium borate pH 9.3, 500 mM sodium chloride, in 384 well plates, was used for arraying the target DNA onto activated microarray slides of the invention. Arraying, (also termed printing or spotting) target molecules on an array slide, was performed using an automated microarraying device equipped with a printing pin having a 80 micron internal width (TeleChem International. Inc., model no. CMP2, “Chipmaker 2 Microspotting Pins”). Approximately 0.5-1 nl of target solution was deposited at each array element (spot or location) using the printing pin. Spot size was regulated at 100-140 microns in diameter due to the tip diameter and the nature of the surface generated on the slides prepared according to the invention. Due to the buffer used for printing and the reactivity of the slides of the invention nucleic acid molecules attach rapidly with no further manipulations. It was discovered as part of the invention that leaving the printed slides at ambient conditions overnight increased attachment of target DNA to the microarray slides in some cases.

[0164] Following spotting, slides were placed in glass racks and washed in 0.2% SDS, followed by three washes in SQ water, followed by an ethanol rinse. This washing procedure removes unattached target DNA and modifies unreacted thiocyanate functionalities. Printed, washed slides were allowed to dry and stored in slide boxes in the dark under ambient conditions.

### Example 5

### Hybridization Method for Microarray Analysis

[0165] The miroarray hybridization method disclosed herein allows enhanced nucleic interaction for improved hybridization and higher signal-to-noise ratio for more sensitive detection. Greater sensitivity is useful when samples, such as tissue samples, are small and limited.

[0166] According to the present invention, formamide and/or dimethylsulfoxide are used to suspend labeled oligonucleotide probes because the fluorescently labeled DNA probe is more soluble in these polar ogranic solvents. Preferably, the amount of polar organic solvent in the hybridization solution is not more than 50%, 40%, 30%, 25%, or 20%. According to the invention, the proportion of DMSO is from 0% to and including 50%, from 0 to and including 40%, from 0 to and including 30%, from 0 to and including 25%, and from 0 to and including 20%. Similarly, the proportion of formamide is from 0% to and including 50%, from 0 to and including 40%, from 0 to and including 30%, from 0 to and including 25%, and from 0 to and including 20%. Thus, according to the invention, the total amount of polar organic solvent (either DMSO or formamide) does not exceed 50%, for example, which the relative proportion of DMSO to formamide is varied from such that the sum of the proportions of these organic solvents does not exceed 50%, in this example.

[0167] In addition, it was discovered by the present inventors that the omission of detergent, sodium dodecyl sulfate (SDS) for example, from the hybridization conditions improved detection. It was discovered that SDS caused the formation of colloidal ;complexes with the fluoorescently labeled DNA probe, causing the probes to precipitate out of solution, limiting detection, and/or causing unwanted detection variability, and/or very high non-specific fluorescent background. The absence of the solid surface wetting capabilities of SDS were overcome by the use of formamide in the hybridization and the glass surface treatment disclosed herein.

[0168] The microarray hybridization method of the invention comprises the following protocol. Before application of the probe, the microarray was denatured by placing it at 95° C. for 2 min. The microarray was then submerged in cold ethanol (approximately 20° C.) to quickly cool it to room temperature and to maintain the denatured state of the sequences in the array. Probes were resuspended in a Final concentration of 5×SSC, 50% formamide. The resuspension was allowed to continue For at least 3 hours and up to overnight (e.g. approximately 10-16 hours in the dark. The control and test probes were pooled, heated to 95-100° C. for 45 seconds, and, while hot, applied as 10 μl aliquots to the surface of the denatured microarray slide, which was on a slide warmer at approximately 50° C. Following application of the probes, a clean glass coverslip was carefully placed over the array to cover it. The covered microarray slide was placed in a hybridization chamber at 37° C. overnight. The hybridization chamber may be any vapor-tight, chemically inert container. For example, the hybridization chamber used in the present example was a plastic container having a vapor-tight plastic lid into which were placed absorbent material, such as paper towels, wet with 50:50 Formamide:water. The interior or the chamber was allowed to equilibrate at 37 C for at least 30 min prior to use.

[0169] Hybridization in Alkylammonium Salt, DMSO, and Formamide

[0170] It was discovered as part of the invention that alkylammonium salts, dimethylsulfoxide (DMSO), and formamide in the microarray hybridization buffer improved detection sensitivity.

[0171] Alexa-dye (Molecular Probes, Eugene, Oreg.) labelled cDNA probes, either + or − strand, may be hybridized to cDNA or oligonucleotide arrays in 2.4 M TEACl (Alfa Aesar, Ward Hill, Mass.) or 3.0 M TEACl (Sigima. St Louis, Mo.) with 50 mM Tris (Sigma). 2 mM EDTA (Sigma) at pH 8.0. The polar solvents formamide (Life Technologies, Rockville, Md.) and dimethylsulfoxide (DMSO) (Sigma) were also included in the array hybridization solution in varying proportions up to a final total concentration of DMSO and formamide of 25% (v/v). In other words, formamide and DMSO concentrations may vary from 25% (v/v) fonnamide and 0% (v/v) DMSO to 0% (v/v) formamide and 25% (v/v) DMSO, for example 20% (v/v) formamide, 5% (v/v) DMSO. It was found as part of the present invention that hybridization or a fluorescently labeled polynucleotide to an oligonucleotide array as disclosed herein was improved when TEACI and DMSO were in the hybridization buffer.

[0172] For example, signal intensity using a first hybridization buffer (Buffer 1) comprising 50% (v/v) formamide, 5×SSC buffer was compared to a second hybridization buffer (Buffer 2) comprising 2.4 M TEACl, 50 mM Tris, 2 mM EDTA, pH 8.0, with 20% formamide/5% (v/v) DMSO. Separate (−) strand labeled cDNA probe mixture were prepared with Alexa488-dUTP or Alexa546-dUTP (Molecular Probes, Eugene, Oreg.) by second strand synthesis with simultaneous label incorporation as disclosed herein. Each labeled probe mixture was divided into equal aliquots and vacuum dried. Samples were resuspended in either 50% (v/v) formamide, 5×SSC buffer (Buffer 1) or 2.4 M TEACl, 50 mM Tris, 2 mM EDTA, pH 8.0, with 20% formamide/5% (v/v) DMSO (Buffer 2). 488 and 456 labeled probes were pooled and each different probe pool was hybridized to one of a microarray duplicate. The results demonstrated fluorescence signal intensity was improved for each label in Buffer 2 relative to Buffer 1 as a result of the addition of TEACl and DMSO. The hybridization signal found with 2.4 M TEACl, 50 mM Tris, 2 mM EDTA, pH 8.0, with 20% formamide/5% (v/v) DMSO was increased 3-5 fold over the signal obtained in hybridization buffer lacking TEACl and DMSO.

[0173] After hybridization, the microarray slides were taken from the chamber. The coverslip was carefully removed and the slides were washed in 2×SSC, 0.2% SDS for 2-5 min., followed by a wash with 0.2×SSC, 0.2% SDS for 2-5 minutes. The slide was covered with a new. clean coverslip to keep the array region wet with the last wash solution while imaging of the hybridized array was performed. Imaging the slides while wet avoids quenching of the chromophores, thus improving both the absolute signal and the quantitative nature of the signal. The top and bottom of the slide were otherwise kept dry. Imaging did not bleach the chromophores and the hybridized microarrays may be stored in the dark for re-imaging for at least 60 days.

### Example 6

### Detection Method

[0174] Means for detecting the labeled hybridized probes are well known to those skilled in the art. In the present example where fluorescently labeled probes were applied to densely arrayed nucleic acid sequences, detection is preferably performed by fluorescence imaging. Alternatively, a CCD camera imaging system was used. For, example, excitation of the chromophores using fluorescence spectroscopy occurs by exposing the hybridized slide to a fluorescent laser or other light source through a filter specific for the desired excitation wavelength. Fluorescent emission was detected at the discrete emission wavelength for each chromophore. The relative emission of test and control probes was analyzed according to the chromophore incorporated into each probe type and the specific microarray member to which a probe hybridized. The analysis provided quantitative information on the relative expression of the genes in diseased tissue. Where automated detection and analysis are desired, an automated system for detecting and quantifying relative hybridization is found, for example, in U.S. Pat. No. 5,143,854, which detection procedures are herein incorporated by reference.

[0175] Microarray slides hybridized with a mixture of test and control probes were viewed using an imaging device configured for fluorescence excitation at 488 nm and 546 nm and detection at the appropriate corresponding wavelengths (e.g. 530 nm and 590 nm, respectively). The device was an imaging fluorimeter that produces a two-dimensional electronic image of emission intensities of the array spots. A device useful for such detection is, for example, an ArrayWoRx™ microarray scanner (Applied Precision, Inc., Issaquah, Wash., USA). A detailed description of the detection process is available from the supplier (see, for example, <www.appliedprecision.com>. last visited Mar. 23, 2000). Briefly, white light is directed through an excitation filter to deliver selected monochromatic light onto to the hybridized sample. Fluorescent emission is focused on a CCD camera having high resolution capability. The collected detection data may be concurrently or subsequently analyzed and reported. Preferably, each emission color is represented separately for display purposes.

[0176] Alternative devices and procedures known in the art are useful for the detection and analysis of the relative complex formation of control and test probes with target polynucleotides according to the invention. Other useful procedures are found in, for example, WO 00/32824 (published Jun. 8, 2000), WO 00/04188 (published Jan. 27, 2000).

[0177] FIGS. 1-4 are examples of microarray experiment results, where the microarrays were prepared and treated according to the methods of the invention disclosed herein (i.e., RNA purification, slide preparation, probe synthesis, and probe hybridization). FIG. 1 is a photograph of microarrays hybridized with probes synthesized from a very small quantity of tumor cells microdissected from tumor tissue. The signal-to-noise is high allowing improved detection of hybridized probes. FIGS. 2A and 2B indicate that detection is comparable for probes synthesized from paraffin-embedded liver versus fresh, frozen liver. FIGS. 2C and 2D demonstrate detection of gene expression in fresh frozen versus paraffin-embedded colon tissue from the same patient. The linear clustering of the detection data from the two differently preserved tissue samples shown in the scatter plot of FIG. 2D illustrates the quantitative gene expression obtained from fresh-frozen versus formalin-fixed, paraffin-embedded tissue is very similar. FIGS. 3A and 3B show a comparison of gene expression in colon tumor relative to gene expression in the control tissue comprising pooled epithilial tissue. Emission intensity of each spot at the emission wavelengths of the chromophores are compared and analyzed to determine the actual relative gene expression in diseased and healthy tissue. FIGS. 4A-4C show that where RNA starting material from an ovarian carcinoma cell line was limited, detection of the probes hybridized to the array was possible for sDNA probes synthesized from 200 pg (FIG. 4A), 20 pg (FIG. 4B), and 2 pg (FIG. 4C) with only one round of amplification by cRNA reverse transciption to labeled sDNA in a 5-hour reaction, as disclosed herein. A 1-color analysis of fluorescence intensity is shown.

[0178] The foregoing written specification is considered sufficient to enable one skilled in the art to practice the invention. The present invention is not to be limited in scope by the examples provided since the embodiments are intended as illustrative of certain aspects of the invention and any embodiments that are functionally equivalent are within the scope of the this invention. The presentation of examples herein does not constitute an admission that the written description herein contained is inadequate to enable the practice of any aspect of the invention, including the best mode thereof, nor is it to be construed as limiting the scope of the claims to the specific illustrations that it represents. Indeed, various modifications of the invention in addition to those shown and described herein will become apparent to those skilled in the art from the foregoing description and fall within the scope of the appended claims. The disclosures of all citations in the specification are expressly incorporated herein by reference.

What is claimed is:

1. A microarray comprising a surface silanized with a silane in toluene in the absence of acetone or an alcohol, and a target molecule, wherein the target molecule is attached to the surface via the silane.

2. A microarray comprising a surface silanized with a silane in toluene in the absence of acetone or an alcohol, a linker, and a target molecule, wherein the target molecule is attached to the surface via the linker.

3. The microarray of claim 2, wherein the target molecule is a polynucleotide.

4. The microarray of claim 3, wherein the polynucleotide is selected from a group consisting of an oligonucleotide, DNA, amplified DNA, cDNA, single stranded DNA, double stranded DNA, PNA, RNA, and mRNA.

5. The microarray of claim 4, wherein the polynucleotide has a length in the range of about 3 bp to 10 kb.

6. The microarray of claim 5, wherein the length is in the range of about 100 bp to 5 kb.

7. The microarray of claim 6, wherein the length is in the range of about 0.3 kb to 3 kb.

8. The microarray of claim 7, wherein the length is in the range of about 0.5 kb to 2 kb.

9. The microarray of claim 4, wherein the polynucleotide is an oligonucleotide and the oligonucleotide is 25-1000 bp, 25-500, 30-200, and 50-100 bp in length.

10. The microarray or claim 2, wherein the target molecule is a polynucleotide and comprises an amine.

11. The microarray of claim 10, wherein the amine group is a primary amine.

12. The microarray of claim 11, wherein the primary amine is at the 5′ end of the polynucleotide.

13. The microarray of claim 11, wherein the primary amine is attached at the 5′ end of the polynucleotide via a linker, wherein the linker comprises one or more monomers of 1-20 carbon atoms, and wherein the monomer comprises a linear chain of carbons or a ring or both.

14. The microarray of claim 12, wherein the polynucleotide is prepared by extending a nucleic acid primer comprising a primary amine at its 5′ end.

15. The microarray of claim 2, wherein the substrate surface is selected from the group consisting of polymeric materials, glasses, ceramics, natural fibers, nylon, nitrocellulose, silicons, metals, and composites thereof.

16. The microarray of claim 15, wherein the substrate surface is planar.

17. The microarray of claim 15, wherein the substrate is in a form of threads, sheets, films, gels, membranes, beads, plates, and like structures.

18. The microarray of claim 15, wherein the substrate surface is glass.

19. The microarray of claim 18, wherein the substrate is a glass slide.

20. The microarray of claim 2, wherein the target molecule is attached after contacting the target molecule with the surface by a technique selected from the group consisting of printing, capillary device contact printing, microfluidic channel printing, deposition on a mask, and electrochemical-based printing.

21. The microarray of claim 20, wherein the target molecule is unmodified prior to the contacting.

22. The microarray of claim 21, wherein the target molecule is modified to comprise an amine prior to the contacting.

23. The microarray of claim 22, wherein the amine is a primary amine.

24. The microarray of claim 23, wherein the target molecule is a polynucleotide and the primary amine is at the 5′ end of the polynucleotide.

25. A microarray prepared by a method comprising:
(a) providing a multifunctional linker reagent comprising two or more reactive groups capable of reacting with a functional group on a surface of a microarray substrate and capable of reacting with a target molecule;
(b) activating the substrate surface for immobilizing the target molecule, by silanizing the surface with a silane in toluene in the absence of acetone or an alcohol, wherein the silane comprises a functionality reactive with the multifunctional linker reagent, and wherein the activating further comprises immobilizing the multifunctional linker reagent on the silanized surface by attaching the multifunctional linker reagent to the silane via a first reactive group of the linker reagent and a reactive group of the silane;
(c) providing a solution comprising a target molecule having one or more functional groups reactive with a second reactive group of the immobilized multifunctional linker reagent;
(d) attaching the target molecule to the substrate surface by contacting the target molecule with the activated substrate surface under conditions that promote attachment of the target molecule to the immobilized multifunctional linker reagent.

26. The microarray of claim 25, wherein the target molecule is a polynucleotide, and wherein the contacting of step (d) is carried out by spotting the polynucleotide on an activated substrate surface.

27. The microarray of claim 26, wherein the polynucleotide is unmodified.

28. The microarray of claim 26, wherein the polynucleotide is modified with an amine group.

29. The microarray of claim 28, wherein the amine group is a primary amine at the 5′ end of the polynucleotide.

30. The microarray of claim 26, wherein the polynucleotide is spotted on the surface at a concentration in the range of approximately 0.1 μg/μt to and including approximately 3 μg/μl.

31. The microarray of claim 25, wherein the attaching of step (d) occurs in a pH range from pH 6 to and including pH 10.

32. The microarray of claim 31, wherein the pH range is from pH 6.5 to and including pH 9.7.

33. The microarray of claim 32, wherein the pH range is from pH 7 to and including pH 9.4.

34. The microarray or claim 33, wherein the pH is 9.3.

35. The microarray of claim 25, wherein the attaching is allowed to occur for a time period from 1 minute to and including 24 hours.

36. The microarray of claim 35, wherein the time period is from 1-24 hours.

37. The microarray of claim 36, wherein the time period is from 5-18 hours.

38. The microarray of claim 37, wherein the time period is from 10-16 hours.

39. The microarray of claim 38, wherein the time period is from 12-14 hours.

40. The microarray of claim 25, wherein the method of preparing the microarray further comprises, after step (d), blocking unreacted reactive groups.

41. An activated slide comprising a substrate surface comprising a silane attached thereto, wherein the silanizing was in toluene, in the absence of acetone or an alcohol, and wherein the attached silane comprises at least one reactive functionality that is capable of reacting with a compound to immobilize the compound on the substrate surface.

42. The activated slide of claim 41, wherein the compound is selected from the group consisting of a modified target molecule, an unmodified target molecule, and a multifunctional linker reagent.

43. The activated slide of claim 42, wherein the compound is a multifunctional linker reagent comprising at least one reactive group capable of reacting with a target molecule to immobilize the target molecule on the substrate.

44. The activated slide of claim 42, wherein the target molecule is an unmodified polynucleotide comprising a native reactive group capable of reacting with the reactive functionality of the silane.

45. The activated slide of claim 43, wherein the target molecule is an unmodified polynucleotide comprising a native reactive group capable of reacting with the reactive group of the multifunctional linker reagent.

46. The activated slide of claim 43, wherein the target molecule is a modified polynucleotide comprising a non-native reactive group capable of reacting with the reactive group of the multifunctional linker reagent.

47. The activated slide of claim 46, wherein the target molecule is a polynucleotide and the non-native reactive group is an amine.

48. The activated slide of claim 47, wherein the amine is a primary amine.

49. The activated slide of claim 48, wherein the primary amine is at the 5′ end of the polynucleotide.

50. The activated slide of claim 41, wherein the silane is an alkyl silane and the alkyl moiety is selected from the group consisting of an ethyl-, a propyl-, a butyl-, a pentyl-, a hexyl-, a heptyl-, an octyl-, a nonyl-, and a decylalkyl moiety, and the reactive functionality of the silane is selected from the group consisting of an amine, a hydroxyl moiety, an epoxide, a thiol, and a halide, and the reactive functionality is covalently linked to the alkyl moiety.

51. The activated slide of claim 50, wherein the reactive functionality of the silane is a primary amine on the alkyl moiety, and wherein at least one reactive group of the multifunctional linker reagent is a thiocyanate moiety, and wherein the multifunctional linker reagent is immobilized by covalent reaction with the primary amine of the silane of the silanized surface.

52. A method of activating a glass slide for immobilizing a target molecule, the method comprising silanizing the slide with a silane in toluene in the absence of acetone or an alcohol, wherein the silane is an alkyl silane and the alkyl moiety is selected from the group consisting of an ethyl-, a propyl-, a butyl-, a pentyl-, a hexyl-, a heptyl-, an octyl-, a nonyl-, and a decylalkyl moiety, and the reactive functionality of the silane is selected from the group consisting of an amine, a hydroxyl moiety, an epoxide, a thiol, and a halide, and the reactive functionality is covalently linked to the alkyl moiety.

53. The method of claim 52 further comprising reacting the silane with a multifunctional linker reagent comprising at least one reactive group capable of reacting with the silane and at least one reactive group capable of reacting with the target molecule for immobilizing the target molecule, wherein the reactive functionality of the silane is a primary amine on the alkyl moiety, and wherein at least one reactive group of the multifunctional linker reagent is a thiocyanate moiety, and wherein the multifunctional linker reagent is immobilized by covalent reaction with the primary amine of the silane of the silanized surface.

54. The method of claim 52, wherein the silane is an alkyl silane and the alkyl moiety is selected from the group consisting of an ethyl-, a propyl-, a butyl-, a pentyl-, a hexyl-, a heptyl-, an octyl-, a nonyl-, and a decylalkyl moiety, and the reactive functionality of the silane is selected from the group consisting of an amine, a hydroxyl moiety, an epoxide, a thiol, and a halide, and the reactive functionality is covalently linked to the alkyl moiety.

55. A method of preparing a microarray, the method comprising:
(a) providing an activated slide comprising a substrate surface comprising a silane attached thereto, wherein the silanizing was in toluene, in the absence of acetone or an alcohol, and wherein the attached silane comprises at least one reactive functionality that is capable of reacting to immobilize a target molecule on the substrate surface;
(b) reacting the activated slide surface with the target molecule under conditions to immobilize the target molecule, wherein the target molecule is selected from the group consisting of a nucleic acid, a polynucleotide, RNA, single stranded DNA, double stranded DNA, an oligonucleotide, a peptide nucleic acid (PNA), a polypeptide, a protein, an antibody, a receptor, and a ligand.

56. The method of claim 55, further comprising after step (a) reacting the activated slide surface with a multifunctional linker reagent comprising at least two reactive groups capable of reacting with the silane to immobilize the multifunctional linker reagent on the surface, wherein the activated surface comprises the multifunctional linker reagent capable of reacting with the target molecule to immobilize the target molecule on the surface.

57. The method of claim 55, wherein the target molecule is a nucleic acid, a polynucleotide, a RNA, a single stranded DNA, a double stranded DNA, an oligonucleotide, or a peptide nucleic acid.

58. The method of claim 56, wherein the target molecule is a nucleic acid, a polynucleotide, a RNA, a single stranded DNA, a double stranded DNA, an oligonucleotide, or a peptide nucleic acid, and the multifunctional linker reagent reactive group is an isothiocyanate and the linker comprises from 1 to 20 carbon atoms.

59. The method of claim 58, wherein the multi functional linker reagent comprises a plurality of linker monomers.

60. The method of claim 55, wherein the target molecule comprises is unmodified.

61. The method of claim 56, wherein the target molecule is modified and comprises an amine.

62. The method of claim 61, wherein the amine is a primary amine at the 5′ end or the target molecule.

63. The method of claim 55, wherein the silane is 3-aminopropyltriethoxysilane.

64. The method of claim 56, wherein the multifunctional linker reagent is 1,4-phenylene diisothiocyanate.

65. A method of preparing a detectably labeled sDNA probe capable of forming a detectable complex with a target molecule immobilized on a microarray surface, the method comprising:
(a) isolating an amount or total cellular RNA from a biological sample;
(b) synthesizing a mixture of detectably labeled sDNA probes, wherein the synthesis of sDNA comprises synthesizing first strand cDNA from the isolated RNA of step (a), synthesizing second strand cDNA using Klenow fragment of DNA polymerase I and the first strand cDNA as template, synthesizing cRNA using the double stranded cDNA as template; and synthesizing sDNA using reverse transcriptase in the presence of delectably labeled deoxyribonucleotide using the cRNA as a template;
(c) isolating the labeled sDNA probes.

66. The method of claim 65, wherein the amount of total cellular RNA comprises from 0.01 to 10 pg messenger RNA.

67. The method of claim 66, wherein the amount of total cellular RNA is from 1-5 pg.

68. The method of claim 67, wherein the amount of total cellular RNA is from 0.5-2 pg.

69. The method of claim 65, wherein the synthesizing of sDNA is also in the presence of hexamer primers under conditions that cause the sDNA probes to have an average length of 0.5-2 kb.

70. A method of preparing a detectably labeled cDNA probe capable of forming a detectable complex with a target molecule immobilized on a microarray surface, the method comprising:
(a) isolating an amount of total cellular RNA from a biological sample;
(b) synthesizing a mixture of detectably labeled cDNA probes, wherein the synthesis of cDNA comprises synthesizing first strand cDNA from the isolated RNA of step (a) in the presence of detectably labeled deoxynucleotide;
(c) isolating the labeled sDNA probes.

71. A method of preparing a detectably labeled sDNA probe capable of forming a detectable complex with a target molecule immobilized on a microarray surface, the method comprising:
(a) isolating an amount of total cellular RNA from a biological sample;
(b) synthesizing a mixture of detectably labeled sDNA probes, wherein the synthesis of sDNA comprises synthesizing a biotin-attached first strand cDNA from the isolated RNA of step (a); synthesizing second strand DNA (sDNA) using Klenow fragment of DNA polymerase I and the first strand cDNA as template in the presence of detectably labeled deoxynucleotides:
(c) contacting the biotin-attached first strand cDNA with streptavidin and removing the biotin-first strand cDNA/streptavidin complex from the labeled sDNA; and
(c) isolating the labeled sDNA probes.

72. A method of preparing a detectably labeled cRNA probe capable of forming a detectable complex with a target molecule immobilized on a microarray surface, the method comprising:
(a) isolating an amount of total cellular RNA from a biological sample;
(b) synthesizing a mixture of delectably labeled cRNA probes, wherein the synthesis or cRNA comprises synthesizing first strand cDNA from the isolated RNA of step (a), synthesizing second strand cDNA using Klenow fragment of DNA polymerase I and the first strand cDNA as template, synthesizing cRNA using the double stranded cDNA as template in the presence of detectably labeled ribonucleotides; and
(c) isolating the labeled sDNA probes.

73. The method of claim 72, further comprising after step (c) degrading the cRNA probe with RNase under conditions such that the average length of the cRNA probe is adjusted to be from 0.5 kb to 3 kb.

74. The method of claim 71, wherein the step of synthesizing second strand DNA is in the presence of hexamer primers under conditions such that the average length of the labeled sDNA probe is from approximately 0.5 kb to approximately 2 kb.

75. The method of claim 70, further comprising after step (b) decreasing the average length of the labeled cDNA probes to be from 0.5 kb to 2 kb.

76. The method of claim 75, wherein the decreasing is by limited DNase digestion.

77. The method of claim 65, wherein the biological sample is selected from the group consisting of a cell, a tissue sample, a body fluid sample, and a mixture of synthetic oligonucleotides.

78. The method of claim 65, wherein the amount of total cellular RNA is from 0.5 pg to and including 10 mg.

79. The method of claim 78, wherein the amount of total cellular RNA is from 1 pg to and including 10 μg.

80. The method of claim 79, wherein the amount of total cellular RNA is from 1 pg to and including 100 ng.

81. The method of claim 80, wherein the amount of total cellular RNA is from 1 pg to and including 10 ng.

82. The method of claim 65, wherein the detectably labeled deoxynucleotide is labeled dUTP and the synthesizing in the presence of labeled dUTP is in the absence of unlabeled dTTP.

83. The method of claim 65, wherein the detectable label is a fluorochromophore.

84. A method of analyzing a target molecule attached to a microarray, the method comprising:
(a) providing a microarray according to claim 1;
(b) contacting the attached target molecule with an agent capable of forming a detectable complex with the target molecule under conditions that allow-formation of a detectable complex;
(c) detecting formation of a detectable complex;
(d) determining the amount of a detectable complex formed.

85. The method of claim 84, wherein the agent capable of forming a detectable complex comprises:
a control mixture of sDNA probes comprising a first detectable label, wherein the probes are prepared from total cellular RNA isolated from a control sample, and
a test mixture of sDNA probes comprising a second detectable label, wherein the probes are prepared from total cellular RNA isolated from a test sample,
wherein the first and second detectable labels are distinguishable, wherein the method further comprises:
(1) pooling the control sDNA probes and the test sDNA probes;
(2) performing steps (a)-(d) of claim 84; and
(3) comparing the amount of detectable complex formed between the target molecule and the control probes relative to the amount of complex formed between the target molecule and the test probes.

86. The method of claim 84, wherein the label is optically detectable.

87. The method of claim 86, wherein the label is fluorescent.

88. The method of claim 84, wherein the contacting of step (b) occurs in the absence of detergent.

89. The method of claim 88, wherein the contacting of step (b) occurs in the presence of formamide and a one or more of dimethylsulfoxide (DMSO), tetramethylammonium chloride (TMACl), and tetraethylammonium chloride (TEACl).

90. The method of claim 89, wherein the contacting of step (b) occurs in the presence of formamide, DMSO and TMACl or TEACl, wherein the sum of the proportions of formamide and DMSO does not exceed 50%.

91. The method of claim 90, wherein the sum of the proportions of formamide and DMSO does not exceed 25%.

92. The method of claim 88, further comprising a wash step subsequent to the contacting step wherein the wash solution comprises detergent.

93. A method of hybridizing a detectable polynucleotide probe to a target polynucleotide on a support surface, the method comprising:
(a) contacting the probe with denatured target polynucleotide on the support surface in a hybridization solution comprising DMSO or formamide or both, and in the absence of detergent; and
(b) detecting formation of a complex between the target polynucleotide and the detectably labeled polynucleotide probe.

94. The method of claim 93, wherein the sum of the proportions of DMSO and formamide does not exceed 50%, and wherein the hybridization solution further comprises TMACl or TMECl or both.

95. The method of claim 94, wherein the sum of the proportions of DMSO and formamide does not exceed 25%, and wherein the hybridization solution further comprises TMACl or TMECl or both.

96. The method of claim 85, wherein the control sample comprises cells removed from a cell source by laser capture microdissection, wherein the cell source is selected from the group consisting of untreated tissue, frozen tissue, paraffin-embedded tissue, stained tissue, and cell culture.

97. The method of claim 85, wherein the test sample comprises cells removed from a cell source by laser capture microdissection, wherein the cell source is selected from the group consisting of untreated tissue, frozen tissue, paraffin-embedded tissue, stained tissue, and cell culture.

98. The method of claim 85, wherein the test sample and control sample differ according to one or more of developmental state, disease state, pre-disease state, cell type, sample source, and experimental treatment conditions.

99. The method of claim 85, wherein the target molecule is a polynucleotide and the nucleic acid isolated from the test sample and the control sample is RNA, and wherein the comparing of step (c) provides a measure of target polynucleotide expression in the test sample relative to target polynucleotide expression in the control sample.

100. The method of claim 99, wherein the relative measure of target polynucleotide expression indicates a disease state in the test tissue sample.

101. The method of claim 100, wherein the disease state is selected from the group consisting of tumor, cardiovasular disease, inflammatory disease, endocrine disease.

102. The method of claim 100, wherein the relative measure of target polynucleotide expression indicates a pre-disease state in the test tissue sample.

103. The method of claim 84, wherein the target molecule is a polynucleotide and the nucleic acid isolated from the test sample and the control sample is DNA, and wherein the comparing of step (c) provides a measure of number of copies of the target polynucleotide in cells of the test sample relative to target polynucleotide copies in the control sample.

104. The method of claim 103, wherein the relative measure of the number of copies of target polynucleotide indicates a disease state or a pre-disease state in the test tissue sample.

The application's sequence listing, which the Patent Office published only in electronic form, follows.

SEQUENCE LISTING (1477 sequences)

SEQ ID NO: 1 - DNA, 850 bp, Homo sapien
ctgcaggcgtcgcgccaatcttcgctctgaggtgctgtctcaccggtgagacctggaagcgggcgagtctcgtgctgtgtcggacctgcagcccctggccttccgccaccatggagtacctcatcggtatccaaggccccgactatgttcttgtcgcctccgaccgggtggccgccagcaatattgtccagatgaaggacgatcatgacaagatgtttaagatgagtgaaaagatattactcctgtgtgttggagaggctggagacactgtacagtttgcagaatatattcagaaaaacgtgcaactttataagatgcgaaatggatatgaattgtctcccacggcagcagctaacttcacacgccgaaacctggctgactgtcttcggagtcggaccccatatcatgtgaacctcctcctggctggctatgatgagcatgaagggccagcgctgtattacatggactacctggcagccttggccaaggccccttttgcagcccacggctatggtgccttcctgactctcagtatcctcgaccgatactacacaccgactatctcacgtgagagggcagtggaactccttaggaaatgtctggaggagctccagaaacgcttcatcctgaatctgccaaccttcagtgttcgaatcattgacaaaaatggcatccatgacctggataacatttccttccccaaacagggctcctaacatcatgtcctccctcccacttgccagggaacttttttttgatgggctcctttatttttttctactcttttcaggcgcactcttgataaatggttaattcagaataaaggtgactatggatataattgaaaaaa

SEQ ID NO: 2 - protein, 201 aa, Homo sapien
MEYLIGIQGPDYVLVASDRVAASNIVQMKDDHDKMFKMSEKILLLCVGEAGDTVQFAEYIQKNVQLYKMRNGYELSPTAAANFTRRNLADCLRSRTPYHVNLLLAGYDEHEGPALYYMDYLAALAKAPFAAHGYGAFLTLSILDRYYTPTISRERAVELLRKCLEELQKRFILNLPTFSVRIIDKNGIHDLDNISFPKQGS

SEQ ID NO: 3 - DNA, 2567 bp, Homo sapien
ctccggcgcagtgttgggactgtctgggtatcggaaagcaagcctacgttgctcactattacgtataatccttttcttttcaagatgcctgaggaagtgcaccatggagaggaggaggtggagacttttgcctttcaggcagaaattgcccaactcatgtccctcatcatcaataccttctattccaacaaggagattttccttcgggagttgatctctaatgcttctgatgccttggacaagattcgctatgagagcctgacagacccttcgaagttggacagtggtaaagagctgaaaattgacatcatccccaaccctcaggaacgtaccctgactttggtagacacaggcattggcatgaccaaagctgatctcataaataatttgggaaccattgccaagtctggtactaaagcattcatggaggctcttcaggctggtgcagacatctccatgattgggcagtttggtgttggcttttattctgcctacttggtggcagagaaagtggttgtgatcacaaagcacaacgatgatgaacagtatgcttgggagtcttctgctggaggttccttcactgtgcgtgctgaccatggtgagcccattggcaggggtaccaaagtgatcctccatcttaaagaagatcagacagagtacctagaagagaggcgggtcaaagaagtagtgaagaagcattctcagttcataggctatcccatcaccctttatttggagaaggaacgagagaaggaaattagtgatgatgaggcagaggaagagaaaggtgagaaagaagaggaagataaagatgatgaagaaaaacccaagatcgaagatgtgggttcagatgaggaggatgacagcggtaaggataagaagaagaaaactaagaagatcaaagagaaatacattgatcaggaagaactaaacaagaccaagcctatttggaccagaaaccctgatgacatcacccaagaggagtatggagaattctacaagagcctcactaatgactgggaagaccacttggcagtcaagcacttttctgtagaaggtcagttggaattcagggcattgctatttattcctcgtcgggctccctttgacctttttgagaacaagaagaaaaagaacaacatcaaactctatgtccgccgtgtgttcatcatggacagctgtgatgagttgataccagagtatctcaattttatccgtggtgtggttgactctgaggatctgcccctgaacatctcccgagaaatgctccagcagagcaaaatcttgaaagtcattcgcaaaaacattgttaagaagtgccttgagctcttctctgagctggcagaagacaaggagaattacaagaaattctatgaggcattctctaaaaatctcaagcttggaatccacgaagactccactaaccgccgccgcctgtctgagctgctgcgctatcatacctcccagtctggagatgagatgacatctctgtcagagtatgtttctcgcatgaaggagacacagaagtccatctattacatcactggtgagagcaaagagcaggtggccaactcagcttttgtggagcgagtgcggaaacggggcttcgaggtggtatatatgaccgagcccattgacgagtactgtgtgcagcagctcaaggaatttgatgggaagagcctggtctcagttaccaaggagggtctggagctgcctgaggatgaggaggagaagaagaagatggaagagagcaaggcaaagtttgagaacctctgcaagctcatgaaagaaatcttagataagaaggttgagaaggtgacaatctccaatagacttgtgtcttcaccttgctgcattgtgaccagcacctacggctggacagccaatatggagcggatcatgaaagcccaggcacttcgggacaactccaccatgggctatatgatggccaaaaagcacctggagatcaaccctgaccaccccattgtggagacgctgcggcagaaggctgaggccgacaagaatgataaggcagttaaggacctggtggtgctgctgtttgaaaccgccctgctatcttctggcttttcccttgaggatccccagacccactccaaccgcatctatcgcatgatcaagctaggtctaggtattgatgaagatgaagtggcagcagaggaacccaatgctgcagttcctgatgagatcccccctctcgagggcgatgaggatgcgtctcgcatggaagaagtcgattaggttaggagttcatagttggaaaacttgtgcccttgtatagtgtccccatgggctcccactgcagcctcgagtgcccctgtcccacctggctccccctgctggtgtctagtgtttttttccctctcctgtccttgtgttgaaggcagtaaactaagggtgtcaagccccattccctctctactcttgacagcaggattggatgttgtgtattgtggtttattttattttcttcattttgttctgaaattaaagtatgcaaaataaagaatatgccgttttaaaaaaaaaaaaaaaaaaaaaaaaaaaaa

SEQ ID NO: 4 - protein, 724 aa, Homo sapien
MPEEVHHGEEEVETFAFQAEIAQLMSLIINTFYSNKEIFLRELISNASDALDKIRYESLTDPSKLDSGKELKIDIIPNPQERTLTLVDTGIGMTKADLINNLGTIAKSGTKAFMEALQAGADISMIGQFGVGFYSAYLVAEKVVVITKHNDDEQYAWESSAGGSFTVRADHGEPIGRGTKVILHLKEDQTEYLEERRVKEVVKKHSQFIGYPITLYLEKEREKEISDDEAEEEKGEKEEEDKDDEEKPKIEDVGSDEEDDSGKDKKKKTKKIKEKYIDQEELNKTKPIWTRNPDDITQEEYGEFYKSLTNDWEDHLAVKHFSVEGQLEFRALLFIPRRAPFDLFENKKKKNNIKLYVRRVFIMDSCDELIPEYLNFIRGVVDSEDLPLNISREMLQQSKILKVIRKNIVKKCLELFSELAEDKENYKKFYEAFSKNLKLGIHEDSTNRRRLSELLRYHTSQSGDEMTSLSEYVSRMKETQKSIYYITGESKEQVANSAFVERVRKRGFEVVYMTEPIDEYCVQQLKEFDGKSLVSVTKEGLELPEDEEEKKKMEESKAKFENLCKLMKEILDKKVEKVTISNRLVSSPCCIVTSTYGWTANMERIMKAQALRDNSTMGYMMAKKHLEINPDHPIVETLRQKAEADKNDKAVKDLVVLLFETALLSSGFSLEDPQTHSNRIYRMIKLGLGIDEDEVAAEEPNAAVPDEIPPLEGDEDASRMEEVD

SEQ ID NO: 5 - DNA, 2657 bp, Homo sapien
gaattccgggccatgagctgccccgtgcccgcctgctgcgcgctgctgctagtcctggggctctgccgggcgcgtccccggaacgcactgctgctcctcgcggatgacggaggctttgagagtggcgcgtacaacaacagcgccatcgccaccccgcacctggacgccttggcccgccgcagcctcctctttcgcaatgccttcacctcggtcagcagctgctctcccagccgcgccagcctcctcactggcctgccccagcatcagaatgggatgtacgggctgcaccaggacgtgcaccacttcaactccttcgacaaggtgcggagcctgccgctgctgctcagccaagctggtgtgcgcacaggcatcatcgggaagaagcacgtggggccggagaccgtgtacccgtttgactttgcgtacacggaggagaatggctccgtcctccaggtggggcggaacatcactagaattaagctgctcgtccggaaattcctgcagactcaggatgaccggcctttcttcctctacgtcgccttccacgacccccaccgctgtgggcactcccagccccagtacggaaccttctgtgagaagtttggcaacggagagagcggcatgggtcgtatcccagactggaccccccaggcctacgacccactggacgtgctggtgccttacttcgtccccaacaccccggcagcccgagccgacctggccgctcagtacaccaccgtcggccgcatggaccaaggagttggactggtgctccaggagctgcgtgacgccggtgtcctgaacgacacactggtgatcttcacgtccgacaacgggatccccttccccagcggcaggaccaacctgtactggccgggcactgctgaacccttactggtgtcatccccggagcacccaaaacgctggggccaagtcagcgaggcctacgtgagcctcctagacctcacgcccaccatcttggattggttctcgatcccgtaccccagctacgccatctttggctcgaagaccatccacctcactggccggtccctcctgccggcgctggaggccgagcccctctgggccaccgtctttggcagccagagccaccacgaggtcaccatgtcctaccccatgcgctccgtgcagcaccggcacttccgcctcgtgcacaacctcaacttcaagatgccctttcccatcgaccaggacttctacgtctcacccaccttccaggacctcctgaaccgcaccacagctggtcagcccacgggctggtacaaggacctccgtcattactactaccgggcgcgctgggagctctacgaccggagccgggacccccacgagacccagaacctggccaccgacccgcgctttgctcagcttctggagatgcttcgggaccagctggccaagtggcagtgggagacccacgacccctgggtgtgcgcccccgacggcgtcctggaggagaagctctctccccagtgccagcccctccacaatgagctgtgaccatcccaggaggcctgtgcacacatcccaggcatgtcccagacacatcccacacgtgtccgtgtggccggccagcctggggagtagtggcaacagcccttccgtccacactcccatccaaggagggttcttccttcctgtggggtcactcttgccattgcctggagggggaccagagcatgtgaccagagcatgtgcccagcccctccaccaccaggggcactgccgtcatggcaggggacacagttgtccttgtgtctgaaccatgtcccagcacgggaattctagacatacgtggtctgcggacagggcagcgcccccagcccatgacaagggagtcttgttttctggcttggtttggggacctgcaaatgggaggcctgaggccctcttcaggctttggcagccacagatacttctgaacccttcacagagagcaggcaggggcttcggtgccgcgtgggcagtacgcaggtcccaccgacactcacctgggagcacggcgcctggctcttaccagcgtctggcctagaggaagcctttgagcgacctttgggcaggtttctgcttcttctgttttgcccatggtcaagtccctgttccccaggcaggtttcagctgattggcagcaggctccctgagtgatgagcttgaacctgtggtgtttctgggcagaagcttatcttttttgagagtgtccgaagatgaaggcatggcgatgcccgtcctctggcttgggttaattcttcggtgacactggcattgctgggtggtgatgcccgtcctctggcttgggttaattcttcggtgacactggcgttgctgggtggcaatgcccgtcctctggcttgggttaattcttcggtgacactggcgttgctgggtggcgatgcccgtcctctggcttgggttaattcttggatgacgtcggcgttgctgggagaatgtgccgttcctgccctgcctccacccacctcgggagcagaagcccggcctggacacccctcggcctggacacccctcgaaggagagggcgcttccttgagtaggtgggctccccttgcccttccctccctatcactccatactggggtgggctggaggaggccacaggccagctattgtaaaagcttttt

SEQ ID NO: 6 - protein, 502 aa, Homo sapien
MSCPVPACCALLLVLGLCRARPRNALLLLADDGGFESGAYNNSAIATPHLDALARRSLLFRNAFTSVSSCSPSRASLLTGLPQHQNGMYGLHQDVHHFNSFDKVRSLPLLLSQAGVRTGIIGKKHVGPETVYPFDFAYTEENGSVLQVGRNITRIKLLVRKFLQTQDDRPFFLYVAFHDPHRCGHSQPQYGTFCEKFGNGESGMGRIPDWTPQAYDPLDVLVPYFVPNTPAARADLAAQYTTVGRMDQGVGLVLQELRDAGVLNDTLVIFTSDNGIPFPSGRTNLYWPGTAEPLLVSSPEHPKRWGQVSEAYVSLLDLTPTILDWFSIPYPSYAIFGSKTIHLTGRSLLPALEAEPLWATVFGSQSHHEVTMSYPMRSVQHRHFRLVHNLNFKMPFPIDQDFYVSPTFQDLLNRTTAGQPTGWYKDLRHYYYRARWELYDRSRDPHETQNLATDPRFAQLLEMLRDQLAKWQWETHDPWVCAPDGVLEEKLSPQCQPLHNEL

SEQ ID NO: 7 - DNA, 2417 bp, Homo sapien
tatattggcagttattgagggtaaagcaatatattgtaacagaatgtataaatatttttgataaaacagtctatattttattaaaaaatgaattataacccattttcagttttgcctgcatcataagagtgagcactccattgctttctttcctggccacactgctacaatccagcactaactatccatgtccagggtaaggatcgagatcgagaagcccacactgccagtgaaaaagctacgtctttactgcataaattagaggaagcaatttcggaacaacggaaccttcaaactataaatactgaattatcgaacacttgccaggcacttcagcagaagacaaggaaactgaagaagctttttagatgaggaatttcctcactatgattccctgtcctgcgcagatgcaattcaacaacctcttcaagaaaaattgaagcagtgttgccacaaactatatggtggtcaagaagcaagaatacatcagacacccctgaccttgaaacatacgtgctggtacacacctctgctggatgccttatctctggatagttttacagcagttccaaccctggaatcaacacctttctcaggtgtagccaaccaaatccacactctgtgtgaaaggcccacatatggagaagtaaaggatggtgctttggatgtaaaaagacaacacaagtgcccaggccccacaagtggccccagcccaggaacgaatctctcaggctgcatcaggatgaatgatgacccaagtatggaagagaatggtgttgaacgcgtgtgtcctgagagcctgctgcagtccaggggatattcctcactaccattacccagacacacttcatcgacagacggtactataacttcaagtgatcctggattagaaattctgaatatggcttcttgtgaccttgacagaaactcgctctgtaagaaagaggaggatacaagatcagcttctcccacgatagaggcccaaggcacaagtccagctcatgataatattgcattccaagactctacgagtaaggataaaaccatattaaatctggaagccaaagaggaaccagaaacaatagaagaacataaaaaagaacatgcttcaggagactctgtggtttcccctcttcctgtaaccactgtgaaatcggttaacgttagacaaagtgagaacacttctgctaatgagaaggaggtggaggcagaatttctcagattatctttgggatttaagtgtgactggtttaccttggagaagagagtgaagcttgaagagaggtcccgtgactgggcagaagaaaatttgaagaaagaaatcactaactctttaaaactattagagtctttaacacctctgtgtgaagatgacaaccaggcacaggaaatcattaagaagctggagaagagtataaagtttcttagccagtgtgcagcacgagtggccagtagggctgagatgttgggagccatcaatcaggaaagccgggttagtaaagcagttgaagtgatgattcagcacgtagaaaacttgaagaggatgtatgccaaagagcacgctgaattagaagaactgaaacaggttcttctgcagaatgaaaggtctttcaatcctcttgaagatgatgatgactgccaaattaaaaaacgttcagcttctctaaactccaagccatcttctctacgaagagtgactattgcctctttacccagaaatattggaaatgcaggaatggtggctgggatggaaaataatgatcgattcagtagaaggtcaagcagttggcgtattttggggtcaaagcagagtgaacaccgtccctcattacctcgatttattagcacctattcctgggcagatgctgaagaagaaaaatgtgaactaaaaactaaagatgactcagagccatctggagaagaaacagtagaaaggacaaggaagccaagtctttctgaaaagaaaaataatccatcaaagtgggatgtctcttcagtttatgacacaatagcttcctgggcaacaaatctcaagtcctccatcagaaaggctaataaggccctctggctctctattgcattcattgtactgtttgcagctttgatgagcttcctcacaggccaattattccagaagtctgtggatgccgctcccacacagcaagaggactcatggacgtctctagaacatatcttgtggccatttaccagactccgacacaatgggccaccaccagtgtgacagcaggacatcctaatatatggatcttgatttttaagtttcagtatctgaacttcgtaaattagtaacttttagctgggaaagtatagcatgaaaccagaggttctcagaatgaccgtaagatagcttacatttcctctttttgcctttatctccccaactaaaatacaatggg

SEQ ID NO: 8 - protein, 555 aa, Homo sapien
MESTPFSGVANQIHTLCERPTYGEVKDGALDVKRQHKCPGPTSGPSPGTNLSGCIRMNDDPSMEENGVERVCPESLLQSRGYSSLPLPRHTSSTDGTITSSDPGLEILNMASCDLDRNSLCKKEEDTRSASPTIEAQGTSPAHDNIAFQDSTSKDKTILNLEAKEEPETIEEHKKEHASGDSVVSPLPVTTVKSVNVRQSENTSANEKEVEAEFLRLSLGFKCDWFTLEKRVKLEERSRDWAEENLKKEITNSLKLLESLTPLCEDDNQAQEIIKKLEKSIKFLSQCAARVASRAEMLGAINQESRVSKAVEVMIQHVENLKRMYAKEHAELEELKQVLLQNERSFNPLEDDDDCQIKKRSASLNSKPSSLRRVTIASLPRNIGNAGMVAGMENNDRFSRRSSSWRILGSKQSEHRPSLPRFISTYSWADAEEEKCELKTKDDSEPSGEETVERTRKPSLSEKKNNPSKWDVSSVYDTIASWATNLKSSIRKANKALWLSIAFIVLFAALMSFLTGQLFQKSVDAAPTQQEDSWTSLEHILWPFTRLRHNGPPPV

SEQ ID NO: 9 - DNA, 2382 bp, Homo sapien
agtaattccgggaagctcgccttacaactccgcgcggcctcggccccctgcgccgcccgccccacaacaaaactcagcgcagcgctcccgggcgcccggttcagagcgacctgcggctcagagcggaggggagactgaccggagcgcggatcgggacagcggccgggacagcggcgagacgcgcgtgtgtgagcgcgccggaccaagcgggcccagaagcgggtctgcagcccagagggcaccttctgcaaacatgtctgtggatcccctatccagcaaagctctaaagatcaagcgagagctgagcgagaacacgccgcacctgtcggacgaggcgctgatggggctgtcggtgcgcgagctgaaccggcatctgcgcgggctctccgccgaggaggtgacacggctcaagcagcggcgccgcacactcaaaaaccgtggctacgccgccagctgccgcgtgaagcgcgtgtgccagaaggaggagctgcagaagcagaagtcggagctggagcgcgaggtggacaagctggcgcgcgagaacgccgccatgcgcctggagctcgacgcgctgcgcggcaagtgcgaggcgctgcagggcttcgcgcgctccgtggccgccgcccgcgggcccgccacgctcgtggcgccggccagcgtcatcaccatcgtcaagtccaccccgggctcggggtctggccccgcccacggcccggaccccgcccacggcccggcctcctgctcctagtgcccgcccccgccatgcctcagccacgcccctccggcctcagctccctccccaaagtgcctgagcgccgcctctgtgcccaggtcccatttctctgcagcactggccccttggtgcacacacattcccttcgtgggccctgtcttcctcttgcagccccccaaactgggaccgaatgaccctgggaaggggaacttgggtaggttggggatggggcagaggtctggatctgggatcgcccttggctgaaagtttagcctttttagattgagagatacagagccggcttagagaacagctgttgggggagaagagggcacccctcatcttggaaactgctcttattgtgccaatatgccctccaaaccctcccaggattcaaagctaggtttggctgtctgtgacttacgggaccgtcctgctgagaaattgcactgaagagatgcccccacctctggttgggcctgggggtgcctggccttccgaaactaaaagagtgggtgggaagactagtgaaacccagttcacggatggggaaacaggcctgaggtcacatttcacttagtggttgtgttgggaccaaaacctgggtgtcctcactgctgccctgagtccagccatggttttcagggggacagtggacagggactcagaaatgtggtgggagggcctccctggcttgggagaccgctctctgcaagggagggggagagaagcagagggagagagaaggtgacacggatggaagagtgggaaggagctggcctggctcagccctaggctgtccctgcagccagggtgtccgggggctggccagtcagagaaagggggccatggactgctgtggcaaatagggagacaaggagacagaccctgcagtcctactacagtctggagtggggtcctaagaagaagggtcccacctcaacccctgtcagtgtccactgtggggtgggggctgacccctgcctttgattgtcattctcctgggaagcccagtctcagtccctcccccaacactgtccacactgcccctccccactgtttatttattgcacggatctaagttattctccccagccagagcccgagctcctgctccctgggaaaagtggcgtatggccctgagctgggctttatattttatatctgcaaataaatcacattttatcttatatttagggaaagccggagagcaacaacaaaaaatgtttaagccgggcgcggtggctcacatctgtaatcccagcactttgggagtccaaggagggggatcgcttgagtccaggagtttgagaccagcctggacaacatggtgaaaccccgtctctacaaaaaatacaaaaattagccatgcatggtggctcatgcctgtagtcccagctacttgggaggctgaggcaggaggatcacttaagcccagaaggcagaggttgtagtgagctgagatcgcaccactgcactccagcctgggcaacatagcaaaatcctgtctcaaaaaaaaagttaaaaaatattgcccggctcctagaatttatttatttcctgacttacagcaagcgagttatcgtcttctgtattttgtagactttctaaataaagtcaaattctttctttttccacagagaaaaaaa

SEQ ID NO: 10 - protein, 164 aa, Homo sapien
MSVDPLSSKALKIKRELSENTPHLSDEALMGLSVRELNRHLRGLSAEEVTRLKQRRRTLKNRGYAASCRVKRVCQKEELQKQKSELEREVDKLARENAAMRLELDALRGKCEALQGFARSVAAARGPATLVAPASVITIVKSTPGSGSGPAHGPDPAHGPASCS

SEQ ID NO: 11 - DNA, 2937 bp, Homo sapien
acgcgtccgcttcggaatgagagactcaaccataatagaaagaatggagaactattaaccaccattcttcagtgggctgtgattttcagaggggaatactaagaaatggttttccatactggaacccaaaggtaaagacactcaaggacagacatttttggcagagcatagatgaaaatggcaagttccctggctttccttctgctcaactttcatgtctccctcttcttggtccagctgctcactccttgctcagctcagttttctgtgcttggaccctctgggcccatcctggccatggtgggtgaagacgctgatctgccctgtcacctgttcccgaccatgagtgcagagaccatggagctgaggtgggtgagttccagcctaaggcaggtggtgaacgtgtatgcagatggaaaggaagtggaagacaggcagagtgcaccatatcgagggagaacttcgattctgcgggatggcatcactgcagggaaggctgctctccgaatacacaacgtcacagcctctgacagtggaaagtacttgtgttatttccaagatggtgacttctacgaaaaagccctggtggagctgaaggttgcagcattgggttctgatcttcacattgaagtgaagggttatgaggatggagggatccatctggagtgcaggtccactggctggtacccccaaccccaaataaagtggagcgacaccaagggagagaacatcccggctgtggaagcacctgtggttgcagatggagtgggcctgtatgcagtagcagcatctgtgatcatgagaggcagctctggtgggggtgtatcctgcatcatcagaaattccctcctcggcctggaaaagacagccagcatatccatcgcagaccccttcttcaggagcgcccagccctggatcgcggccctggcagggaccctgcctatctcgttgctgcttctcgcaggagccagttacttcttgtggagacaacagaaggaaaaaattgctctgtccagggagacagaaagagagcgagagatgaaagaaatgggatacgctgcaacagagcaagaaataagcctaagagagaagctccaggaggaactcaagtggaggaaaatccagtacatggctcgtggagagaagtctttggcctatcatgaatggaaaatggccctcttcaaacctgcggatgtgattctggatccagacacggcaaacgccatcctccttgtttctgaggaccagaggagtgtgcagcgtgctgaagagccgcgggatctgccagacaaccctgagagatttgaatggcgttactgtgtccttggctgtgaaaacttcacatcagggagacattactgggaggtggaagtgggggacagaaaagagtggcatattggggtatgtagtaagaacgtggagaggaaaaaaggttgggtcaaaatgacaccggagaacggatactggactatgggcctgactgatgggaataagtatcgggctctcactgagcccagaaccaacctgaaacttcctgagcctcctaggaaagtggggatcttcctggactatgagactggagagatctcgttctataatgccacagatggatctcatatctacacctttccgcacgcctctttctctgagcctctatatcctgttttcagaattttgaccttggagcccactgccctgaccatttgcccaataccaaaagaagtagagagttcccccgatcctgacctagtgcctgatcattccctggagacaccactgaccccgggcttagctaatgaaagtggggagcctcaggctgaagtaacatctctgcttctccctgcccaccctggagctgaggtctccccttctgcaacaaccaatcagaaccataagctacaggcacgcactgaagcactttactgatattcattccattattccatatgacagttgttttgagtttcgtaccaccttattgtccccttatacagataaggaaactggggtgcagaaaggtgaattaactttacaaagtagacatgacaagtgaacagcagagctgggatctaaacagcaataactaacattaacagagaatttaaaatgttcttagtgctgtgttataagctttggtggatgtcactcctttaatcctcacaacaccctgtcgggtagtcatattttgcaagtatggaagctgaggcagggcaacatgaagtaacttacataattcatacagtaatttgtgcagttgggagatgttcagccttagtccctggctaattgcctgttcttttccagcctgattttttttcccacaggaagagcccacatgtagccctgaggtttccttcccaggacagctgcagggtagagatcattttaagtgcttgtggagttgacatccctattgactctttcccagctgatatcagagacttagacccagcactccttggattagctctgcagagtgtcttggttgagagaataacctcatagtaccaacatgacatgtgacttggaaagagactagaggccacacttgataaatcatggggcacagatatgttcccacccaacaaatgtgataagtgattgtgcagccagagccagccttccttcaatcaaggtttccaggcagagcaaataccctagagattctctgtgatataggaaatttggatcaaggaagctaaaagaattacagggatgtttttaatcccactatggactcagtctcctggaaataggtctgtccactcctggtcattggtggatgttaaacccatattcctttcaactgctgcctgctagggaaaactgctcctcattatcatcactattattgctcaccactgtatcccctctacttggcaagtggttgtcaagttctagttgttcaataaatgtgttaataatgaaaaaaaaaaa

SEQ ID NO: 12 - protein, 584 aa, Homo sapien
MKMASSLAFLLLNFHVSLFLVQLLTPCSAQFSVLGPSGPILAMVGEDADLPCHLFPTMSAETMELRWVSSSLRQVVNVYADGKEVEDRQSAPYRGRTSILRDGITAGKAALRIHNVTASDSGKYLCYFQDGDFYEKALVELKVAALGSDLHIEVKGYEDGGIHLECRSTGWYPQPQIKWSDTKGENIPAVEAPVVADGVGLYAVAASVIMRGSSGGGVSCIIRNSLLGLEKTASISIADPFFRSAQPWIAALAGTLPISLLLLAGASYFLWRQQKEKIALSRETEREREMKEMGYAATEQEISLREKLQEELKWRKIQYMARGEKSLAYHEWKMALFKPADVILDPDTANAILLVSEDQRSVQRAEEPRDLPDNPERFEWRYCVLGCENFTSGRHYWEVEVGDRKEWHIGVCSKNVERKKGWVKMTPENGYWTMGLTDGNKYRALTEPRTNLKLPEPPRKVGIFLDYETGEISFYNATDGSHIYTFPHASFSEPLYPVFRILTLEPTALTICPIPKEVESSPDPDLVPDHSLETPLTPGLANESGEPQAEVTSLLLPAHPGAEVSPSATTNQNHKLQARTEALY

SEQ ID NO: 13 - DNA, 6754 bp, Homo sapien
ccgggctgcgcggcgaggctgagccgggcccgggcgccggggccgggggcggctggcgcgggcaggaagcgcctcgcggacccgggcccgccccccgcctcccgccgcctccgggctcccggctcccggccgcgcctcgccccatgcactcgccgcgccgcgcagcccgcgcacgcccggatggctcctcgcgccgcgggcggcgcaccccttagcgcccgggccgccgccgccagccccccgccgttccagacgccgccgcggtgcccggtgccgctgctgttgctgctgctcctgggggcggcgcgggccggcgccctggagatccagcgtcggttcccctcgcccacgcccaccaacaacttcgccctggacggcgcggcggggaccgtgtacctggcggccgtcaaccgcctctatcagctgtcgggcgccaacctgagcctggaggccgaggcggccgtgggcccggtgcccgacagcccgctgtgtcacgctccgcagctgccgcaggcctcgtgcgagcacccgcggcgcctcacggacaactacaacaagatcctgcagctggaccccggccagggcctggtagtcgtgtgcgggtccatctaccagggcttctgccagctgcggcgccggggtaacatctcggccgtggccgtgcgcttcccgcccgccgcgccgcccgccgagcccgtcacggtgttccccagcatgctgaacgtggcggccaaccacccgaacgcgtccaccgtggggctagttctgcctcccgccgcgggcgcggggggcagccgcctgctcgtgggcgccacgtacaccggttacggcagctccttcttcccgcgcaaccgcagcctggaggaccaccgcttcgagaacacgcccgagatcgccatccgctccctggacacgcgcggcgacctggccaagctcttcaccttcgacctcaacccctccgacgacaacatcctcaagatcaagcagggcgccaaggagcagcacaagctgggcttcgtgagcgccttcctgcacccgtccgacccgccgccgggtgcacagtcctacgcgtacctggcgctcaacagcgaggcgcgcgcgggcgacaaggagagccaggcgcggagcctgctggcgcgcatctgcctgccccacggcgccggcggcgacgccaagaagctcaccgagtcctacatccagttgggcttgcagtgcgcgggcggcgcgggccgcggcgacctctacagccgcctggtgtcggtcttcccagcccgggagcggctctttgctgtcttcgagcggccccaggggtcccccgcggcccgcgctgctccggccgcactctgcgccttccgcttcgccgacgtgcgagccgccatccgagctgcgcgcaccgcctgcttcgtggaaccggcgcccgacgtggtggcggtgctcgacagcgtggtgcagggcacgggaccggcctgcgagcgcaagctcaacatccagctccagccagagcagctggactgtggagctgctcacctgcagcacccgctgtccatcctgcagcccctgaaggccacgcccgtgttccgcgccccgggcctcacctccgtggccgtggccagcgtcaacaactacacagcggtcttcctgggcacggtcaacgggaggcttctcaagatcaacctgaacgagagcatgcaggtggtgagcaggcgggtggtgactgtggcctatggggagcccgtgcaccatgtcatgcagtttgacccagcagactccgtttacctttacctgatgacgtcccaccagatggccagggtgaaggtcgccgcctgcaacgtgcactccacctgtggggactgcgtgggtgcggcggacgcctactgcggctggtgtgccctggagacgcggtgcaccttgcagcaggactgcaccaattccagccagcagcatttctggaccagtgccagcgagggccccagccgctgtcctgccatgaccgtcctgccttccgagatcgatgtgcgccaggagtacccaggcatgatcctgcagatctcgggcagcctgcccagcctcagtggcatggagatggcctgtgactatgggaacaacatccgcactgtggctcgggtcccaggccctgcctttggtcaccagattgcctactgcaacctcctgccgagggaccagtttccgcccttcccccccaaccaggaccacgtgactgttgagatgtctgtgagggtcaatgggcggaacatcgtcaaggccaatttcaccatctacgactgcagccgcactgcacaagtgtacccccacacagcctgtaccagctgcctgtcggcacagtggccctgtttctggtgcagccagcagcactcctgtgtttccaaccagtctcggtgcgaggcctcaccaaaccccacgagccctcaggactgcccccggaccctgctctcacccctggcacccgtgcctacgggtggctcccagaacatcctggtgcctctggccaacactgcctttttccagggtgcagccctggagtgtagttttgggctggaggagatcttcgaggctgtgtgggtgaatgagtctgttgtacgctgtgaccaggtggtgctgcacacgacccggaagagccaggtgttcccgctcagcctccaactaaaggggcggccagcccgattcctggacagccctgagcccatgacagtcatggtctataactgtgccatgggcagccccgactgttcccagtgcctgggccgcgaagacctgggtcacctgtgcatgtggagtgatggctgccgcctgcgggggcctctgcagcccatggctggcacctgccccgcccccgagatccgcgcgattgagcccctgagtggcccgttggacggtgggaccctgctgaccatccgaggaaggaacctgggccggcggctcagtgacgtggcccacggcgtgtggattggtggtgtggcctgtgagccactgcctgacagatacacggtgtcggaggagatcgtgtgtgtcacagggccagccccaggaccactctcaggtgtggtgaccgtgaacgcctctaaggagggcaagtcccgggaccgcttctcctacgtgctgcccctggtccactccctggagcctaccatgggccccaaggccgggggcaccaggatcaccatccatgggaatgacctccatgtaggctccgagctccaggtcctggtgaacgacacagacccctgcacggagctgatgcgcacagataccagcatcgcctgcaccatgcctgagggggccctgccggctccggtgcctgtgtgtgtgcgcttcgagcgtcggggctgcgtgcacggcaacctcaccttctggtacatgcagaacccggtcatcacggccatcagtccccgccgcagccctgtcagtggcggcaggaccatcacagtggctggtgagcgtttccacatggtgcagaatgtgtccatggccgtccaccacattggccgggagcccacgctctgcaaggttctcaactccaccctcatcacctgcccgtcccccggggccctgagcaacgcatcagcgccagtggacttcttcatcaatgggcgggcctacgcagacgaggtggctgtggctgaggagctactggaccccgaggaggcacagcggggcagcaggttccgcctggactacctccccaacccacagttctctacggccaagagggagaagtggatcaagcaccaccccggggagcctctcaccctcgttatccacaaggagcaggacagcctggggctccagagtcacgagtaccgggtcaagataggccaagtaagctgcgacatccagattgtctctgacagaatcatccactgctcggtcaacgagtccctgggcgcggccgtggggcagctgcccatcacaatccaggtagggaacttcaaccagaccatcgccacactgcagctggggggtagcgagacggccatcatcgtgtccatcgtcatctgcagcgtcctgctgctgctctccgtggtggccctgttcgtcttctgtaccaagagccgacgtgctgagcgttactggcagaagacgctgctgcagatggaggagatggaatctcagatccgagaggaaatccgcaaaggcttcgctgagctgcagacagacatgacagatctcaccaaggagctgaaccgcagccagggcatccccttcctggagtataagcacttcgtgacccgcaccttcttccccaagtgttcctccctttatgaagagcgttacgtgctgccctcccagaccctcaactcccagggcagctcccaggcacaggaaacccacccactgctgggagagtggaagattcctgagagctgccggcccaacatggaagagggaattagcttgttctcctcactactcaacaacaagcacttcctcatcgtctttgtccacgcgctggagcagcagaaggactttgcggtgcgcgacaggtgcagcctggcctcgctgctgaccatcgcgctgcacggcaagctggagtactacaccagcatcatgaaggagctgctggtggacctcattgacgcctcggccgccaagaaccccaagctcatgctgcggcgcacagagtctgtggtggagaagatgctcaccaactggatgtccatctgcatgtacagctgtctgcgggagacggtgggggagccattcttcctgctgctgtgtgccatcaagcagcaaatcaacaagggctccatcgacgccatcacaggcaaggcccgctacacactcaatgaggagtggctgctgcgggagaacatcgaggccaagccccggaacctgaacgtgtccttccagggctgtggcatggactcgctgagcgtgcgggccatggacaccgacacgctgacacaggtcaaggagaagatcctggaggccttctgcaagaatgtgccctactcccagtggccgcgtgcagaggacgtcgaccttgagtggttcgcctccagcacacagagctacatccttcgggacctggacgacacctcagtggtggaagacggccgcaagaagcttaacacgctggcccattacaagatccctgaaggtgcctccctggccatgagtctcatagacaagaaggacaacacactgggccgagtgaaagacttggacacagagaagtatttccatttggtgctgcctacggacgagctggcggagcccaagaagtctcaccggcagagccatcgcaagaaggtgctcccggaaatctacctgacccgcctgctctccaccaagggcacgttgcagaagtttctggatgacctgttcaaggccattctgagtatccgtgaagacaagcccccactggctgtcaagtactttttcgacttcctggaggagcaggctgagaagaggggaatctccgaccccgacaccctacacatctggaagaccaacagccttcctctccggttctgggtgaacatcctgaagaacccccagtttgtctttgacatcgacaagacagaccacatcgacgcctgcctttcagtcatcgcgcaggccttcatcgacgcctgctccatctctgacctgcagctgggcaaggattcgccaaccaacaagctcctctacgccaaggagattcctgagtaccggaagatcgtgcagcgctactacaagcagatccaggacatgacgccgctcagcgagcaagagatgaatgcccatctggccgaggagtcgaggaaataccagaatgagttcaacaccaatgtggccatggcagagatttataagtacgccaagaggtatcggccgcagatcatggccgcgctggaggccaaccccacggcccggaggacacaactgcagcacaagtttgagcaggtggtggctttgatggaggacaacatctacgagtgctacagtgaggcctgagacacatggagagttggtcaggctgctgctgggagaaatggacgcccactgggcctcaacttgatcttctaccccgtgcctgtgactcagactgggaaatactgagcagagacggctggggcgggggcaggaggaggggctgctctctgagacaggggcgcccccgccttgacccctgggcacctccatcccctcccacctgtccccagatcagtctctgggatggaggccagagagctggtcaggctcccccatctgcccagcacggcctgcactgtgcccacccacttgctccacaacgtccagttggtcctgctgccaagagccccgtgcatccaggcggccaagcacaaactgggggagaggaggccgccagcccggaggctgcagcccagaaactctacctcatccacactggtgcagggagccctccttgaactgacctttgattggtttctgcttcaactaccaaaatgttatctccacttccccctcacccgtagaggatcctggccacagacagtttcaagtagtgtcagatttttgttgcttgggcggctgttggtagagtgggcagtgcccgcgccatggggtgctctgtgggcttctccaggagcagggagggtggaggggagggatggggggcacaggagctgggagccccgtctccaggaaaaggagaggggttaagatgcaccgaggctgtagctgggctacttgatcttgctgaaagtgtttctaaagatagcaccacttttttttttaaagcttttatatattaaaaaacgtatcatgc

SEQ ID NO: 14 - protein, 1985 aa, Homo sapien
PGCAARLSRARAPGPGAAGAGRKRLADPGPPPASRRLRAPGSRPRLAPCTRRAAQPAHARMAPRAAGGAPLSARAAAASPPPFQTPPRCPVPLLLLLLLGAARAGALEIQRRFPSPTPTNNFALDGAAGTVYLAAVNRLYQLSGANLSLEAEAAVGPVPDSPLCHAPQLPQASCEHPRRLTDNYNKILQLDPGQGLVVVCGSIYQGFCQLRRRGNISAVAVRFPPAAPPAEPVTVFPSMLNVAANHPNASTVGLVLPPAAGAGGSRLLVGATYTGYGSSFFPRNRSLEDHRFENTPEIAIRSLDTRGDLAKLFTFDLNPSDDNILKIKQGAKEQHKLGFVSAFLHPSDPPPGAQSYAYLALNSEARAGDKESQARSLLARICLPHGAGGDAKKLTESYIQLGLQCAGGAGRGDLYSRLVSVFPARERLFAVFERPQGSPAARAAPAALCAFRFADVRAAIRAARTACFVEPAPDVVAVLDSVVQGTGPACERKLNIQLQPEQLDCGAAHLQHPLSILQPLKATPVFRAPGLTSVAVASVNNYTAVFLGTVNGRLLKINLNESMQVVSRRVVTVAYGEPVHHVMQFDPADSVYLYLMTSHQMARVKVAACNVHSTCGDCVGAADAYCGWCALETRCTLQQDCTNSSQQHFWTSASEGPSRCPAMTVLPSEIDVRQEYPGMILQISGSLPSLSGMEMACDYGNNIRTVARVPGPAFGHQIAYCNLLPRDQFPPFPPNQDHVTVEMSVRVNGRNIVKANFTIYDCSRTAQVYPHTACTSCLSAQWPCFWCSQQHSCVSNQSRCEASPNPTSPQDCPRTLLSPLAPVPTGGSQNILVPLANTAFFQGAALECSFGLEEIFEAVWVNESVVRCDQVVLHTTRKSQVFPLSLQLKGRPARFLDSPEPMTVMVYNCAMGSPDCSQCLGREDLGHLCMWSDGCRLRGPLQPMAGTCPAPEIRAIEPLSGPLDGGTLLTIRGRNLGRRLSDVAHGVWIGGVACEPLPDRYTVSEEIVCVTGPAPGPLSGVVTVNASKEGKSRDRFSYVLPLVHSLEPTMGPKAGGTRITIHGNDLHVGSELQVLVNDTDPCTELMRTDTSIACTMPEGALPAPVPVCVRFERRGCVHGNLTFWYMQNPVITAISPRRSPVSGGRTITVAGERFHMVQNVSMAVHHIGREPTLCKVLNSTLITCPSPGALSNASAPVDFFINGRAYADEVAVAEELLDPEEAQRGSRFRLDYLPNPQFSTAKREKWIKHHPGEPLTLVIHKEQDSLGLQSHEYRVKIGQVSCDIQIVSDRIIHCSVNESLGAAVGQLPITIQVGNFNQTIATLQLGGSETAIIVSIVICSVLLLLSVVALFVFCTKSRRAERYWQKTLLQMEEMESQIREEIRKGFAELQTDMTDLTKELNRSQGIPFLEYKHFVTRTFFPKCSSLYEERYVLPSQTLNSQGSSQAQETHPLLGEWKIPESCRPNMEEGISLFSSLLNNKHFLIVFVHALEQQKDFAVRDRCSLASLLTIALHGKLEYYTSIMKELLVDLIDASAAKNPKLMLRRTESVVEKMLTNWMSICMYSCLRETVGEPFFLLLCAIKQQINKGSIDAITGKARYTLNEEWLLRENIEAKPRNLNVSFQGCGMDSLSVRAMDTDTLTQVKEKILEAFCKNVPYSQWPRAEDVDLEWFASSTQSYILRDLDDTSVVEDGRKKLNTLAHYKIPEGASLAMSLIDKKDNTLGRVKDLDTEKYFHLVLPTDELAEPKKSHRQSHRKKVLPEIYLTRLLSTKGTLQKFLDDLFKAILSIREDKPPLAVKYFFDFLEEQAEKRGISDPDTLHIWKTNSLPLRFWVNILKNPQFVFDIDKTDHIDACLSVIAQAFIDACSISDLQLGKDSPTNKLLYAKEIPEYRKIVQRYYKQIQDMTPLSEQEMNAHLAEESRKYQNEFNTNVAMAEIYKYAKRYRPQIMAALEANPTARRTQLQHKFEQVVALMEDNIYECYSEA

SEQ ID NO: 15 - DNA, 3929 bp, Homo sapien
ccctttttcctcccgttttgaagagacaatgctacttcagtttggagcacaaacatatgatcagcacatggaaatgtggtaattcggatgcattcgtgattgcaacagattgaagaaattagaccagacaaagagtgtttttagaggagagaggaggaggaggaggctgagagagggagggcgacgggggtgagaaaggggaggccgcctctgagcgggacgccgggactcccgccgctgctaaatatatccgtagaatggagagggaccggatctcagccttgaaaagatcttttgaggtcgaggaggtcgagacacccaactccaccccaccccggagggtccagactcccctactccgagccactgtggccagctccacccagaaattccaggacctgggcgtgaagaactcagaaccctcggcccgccatgtggactccctaagccaacgctcccccaaggcgtccctgcggagggtggagctctcgggccccaaggcggccgagccggtgtcccggcgcactgagctgtccattgacatctcgtccaagcaggtggagaacgccggggccatcggcccgtcccggttcgggctcaagagggccgaggtgttgggccacaagacgccagaaccggcccctcggaggacggagatcaccatcgtcaaaccccaggagtcagcccaccggaggatggagccccctgcctccaaggtccccgaggtgcccactgcccctgccaccgacgcagcccccaagagggtggagatccagatgcccaagcctgctgaggcgcccaccgcccccagcccagcccagaccttggagaattcagagcctgcccctgtgtctcagctgcagagcaggctggagcccaagccccagccccctgtggctgaggctacaccccggagccaggaggccactgaggcggctcccagctgcgttggcgacatggccgacacccccagagatgccgggctcaagcaggcgcctgcatcacggaacgagaaggccccggtggacttcggctacgtggggattgactccatcctggagcagatgcgccggaaggccatgaagcagggcttcgagttcaacatcatggtggtcgggcagagcggcttgggtaaatccaccttaatcaacaccctcttcaaatccaaaatcagccggaagtcggtgcagcccacctcagaggagcgcatccccaagaccatcgagatcaagtccatcacgcacgatattgaggagaaaggcgtccggatgaagctgacagtgattgacacaccagggttcggggaccacatcaacaacgagaactgctggcagcccatcatgaagttcatcaatgaccagtacgagaaatacctgcaggaggaggtcaacatcaaccgcaagaagcgcatcccggacacccgcgtccactgctgcctctacttcatccccgccaccggccactccctcaggcccctggacatcgagtttatgaaacgcctgagcaaggtggtcaacatcgtccctgtcatcgccaaggcggacacactcaccctggaggagagggtccacttcaaacagcggatcaccgcagacctgctgtccaacggcatcgacgtgtacccccagaaggaatttgatgaggactcggaggaccggctggtgaacgagaagttccgggagatgatcccatttgctgtggtgggcagtgaccacgagtaccaggtcaacggcaagaggatccttgggaggaagaccaagtggggtaccatcgaagttgaaaacaccacacactgtgagtttgcctacctgcgggaccttctcatcaggacgcacatgcagaacatcaaggacatcaccagcagcatccacttcgaggcgtaccgtgtgaagcgcctcaacgagggcagcagcgccatggccaacggcgtggaggagaaggagccagaagccccggagatgtagacgccccctgcccacccccgggatcctgcccccaagtcatttccgtcccccccccaggccctcccaccaccccattttattttatatgattttctccatttgtcatcgttccccaccccttcgacatgctgccaggaaacaagggaaggggcctccctccgagtgagtcagtgatgaggccgcggcctccccgaggttgtggggaggctgcactggagccacaggcaggggtgagagcacccactgaattgacatgaccctctgtccccaggcctggctccccgagggctcagaagagcagcttcggtgtgcagatcatccgtcgtgtggggttctcagtgccggagcttggggtgggggccaggcctcgcacttgcagaggagcccagtgggctgcacgctcccctccatccccatcggccctgtcccctggagtgtgtcagagcccaggggagaatgcagcccaccaggagcacctggaccccctgcccgccacatggtgtggccatcactcagcccctacccctgccctgctcctaagggtagaaaactccagggtcccctgccaccgactgcccagccactccaagccccctggcagctgcccctcctggagcagaaagtgcctttatctcagccatccgcagactgctggccagatgcggggacaggctggaatgagggaggcgtcttcatctccctgccatccccctctcacgccacccccgcccccaccgggctgcaggtgctgctgatgcgctgggatctgattgaggataaaaaggaaggagagatgacccctaccccctcatcccccagttttgaaaaggtctaagcaagtgagtctggtggaggagctgagggagggagccatggaaggtgccagaaggaaggttggcgggggcacgtgtgggccgtggcttgggctggtcagagtggcgtgagctgcccggcgcctgccctgcccaagtgaccagggaagtgtgtgtgtgtccatgtgtatgcgtgtccgtctgtctgtctagtgtctgggtttggcccaagactgggctgtagttacattaatgcccagccagccacccctgccactcacccctcctggcccaggccttgctgactctctgagctggggaggtgggaggccaggcgagcctgactctgttgatctacccgtgcctgggcccctcccctcagagcccatggtaacgaacccctagaaaggagagaacgggcgtcaggggtgcacagtccacagctgaagagcaaggtttcgtggcagcacggcccggcccctcaccctctgtccccacgaggggacccatgggggctgtctttgcagggcacagatgaccaaagtcccttcctgcttcctgttacctgtcttgctcctggggagaaagaggggcctgatgagactccactcaggtgcacacatcaccaggtgcatctgcaggcaccgggctggctgcttgcagccaggagaaggtcagcgagaaggagtgtatgagtgtgagtgtgtgtgcatggaagttggggcactgggcgtctgactccctccccacccaagagaggaaggacccctcaccacccccactggcgagacagtttactttgccgacttgccatgtttttgccaaaaccaagattttgaaggaaatgagtggccagcgccagggcccaggccatgtggcctgcccagcctcaatgtcacttggcggcggggtggggtgggggtgggcagcagcatcccagccttgagatgcttcactttccttctctgtaaccagactttgaaaaattgttcgtttcatcaggctctgttcctcaatggccttttgctacgtgcctcccgagaaatttgtctttttgtataaatgacaaagtgttgaaaatgtatttcctgaaataaatgtttcaaatgcagaaacccaaaaaaaaaaaaaaaaaaaaaaaaaaaaaaaaaaa

SEQ ID NO: 16 - protein, 568 aa, Homo sapien
MERDRISALKRSFEVEEVETPNSTPPRRVQTPLLRATVASSTQKFQDLGVKNSEPSARHVDSLSQRSPKASLRRVELSGPKAAEPVSRRTELSIDISSKQVENAGAIGPSRFGLKRAEVLGHKTPEPAPRRTEITIVKPQESAHRRMEPPASKVPEVPTAPATDAAPKRVEIQMPKPAEAPTAPSPAQTLENSEPAPVSQLQSRLEPKPQPPVAEATPRSQEATEAAPSCVGDMADTPRDAGLKQAPASRNEKAPVDFGYVGIDSILEQMRRKAMKQGFEFNIMVVGQSGLGKSTLINTLFKSKISRKSVQPTSEERIPKTIEIKSITHDIEEKGVRMKLTVIDTPGFGDHINNENCWQPIMKFINDQYEKYLQEEVNINRKKRIPDTRVHCCLYFIPATGHSLRPLDIEFMKRLSKVVNIVPVIAKADTLTLEERVHFKQRITADLLSNGIDVYPQKEFDEDSEDRLVNEKFREMIPFAVVGSDHEYQVNGKRILGRKTKWGTIEVENTTHCEFAYLRDLLIRTHMQNIKDITSSIHFEAYRVKRLNEGSSAMANGVEEKEPEAPEM

SEQ ID NO: 17 - DNA, 2176 bp, Homo sapien
ccgcttccccgtcttgtacacccctaactcctgaggctcctccgaatcacgcgagtggaagcggagaagctcaagtggccgccatgtcagaggcttatttccgagtggagtcgggtgcgctggggcctgaggagaactttctttctttggacgacatcctgatgtcccacgagaagctgccggtgcgcacggagaccgccatgcctcgccttggcgctttcttcctggagcggagcgcaggcgccgagactgacaacgcggtcccacagggttccaagcttgaactacccttgtggctggcaaaaggactttttgacaacaagcgacggatcctttctgtggaactccccaagatctaccaagagggttggaggactgtgttcagtgcagatcccaatgtggtggacctccacaaaatggggccccatttctacgggtttggctcccagctcctgcattttgacagtcccgagaatgcagacatttcccagtctctgctgcagacttttatcggacgttttcgccgcatcatggactcctcacagaatgcttacaacgaagacacttcagccctggtagccaggctagacgagatggagaggggcttatttcaaacagggcagaaaggactgaatgactttcagtgttgggagaaggggcaggcttctcagatcacagcttccaacctcgttcagaattacaagaagagaaaattcactgatatggaagactgaaagccggaagaacacagaatggctcctcacagacgtatccctccgtgtgtccttgataggagctggttgaccttgtacagaaccagaatcctgtcccatttcatggcttatttcctgtggccatagagaattatagggaactggacatgctggaggatgtgggtgtccctggctctgtgagtcttccaggaccgtcccaccctgctgacccacagcccaggccctttaacccaagaacccatggccaaggagaaatcaaagtccttcctaaataagaatcactgccatataatatatcacagtagagttgcaactgagattccttgtgtctgggagtttggacagcttcagatgtacagtttcactagccacaaagcacaggtacaaactgggtcatcgcctgttcacaaaatgctctcttgatcttatttgcctcatcttcctcatggttgtacagaggatagcaccccaccatgccagcctgacttggagatatctcctgctgcctgcctgcagggagttaccccagtttccaaaaacagtcgcccagataaaggaggaaaagggaaaggcagacgaatggcatggcttttactaaagaaaagatgttggcctcatactctatactcagggcttaatgaactggaatctgcataactcagcagtcaacccagaagggaaatggttaaactgagcttgttattgcctcggagagcctaagagcacccgcacacttaattctactccctgtctagaaaagctgtcagggagtcgtttggaattgcaatgtagttattaagggctgttaaccagcctgcattacatctggaagtcaggacttgggtgctgactatgaagggccctgttttcaaaatctaacattgcaagtgtaaatgggcaagaagcctccgttgtgctttttttttcctcttcagtaacttttgcaacattattgcatagaagatccctgaccatttactaggaacctggttaagcaagcactaatctcttttcctggagatcaaggatgcaacctcaggttgagaaagaaacagggttccctgggcccattagactgtttgcagggcatcactgcttccccctgacacctcacaactagcaaaaattgtctttgtctttggaaattatagagggatttgggtatccagattgtgcagatgcaaacttaggctgtcttgatgcaaacttagaaccacagaaatgcttttaaaatgcctgttttaagatggaattgttgtttttataatttgattttagtgctaaataaatgattggctttgtacatgaatatgttctgtacaagtgctctttcactagtactacagataatcaaagctatcagaattgtgtctttgatcatatttgacggtaatacacaaataaatccatgttttagcaaaaaaaaaaaaaaaaaaaaaaaa

SEQ ID NO: 18 - protein, 216 aa, Homo sapien
MSEAYFRVESGALGPEENFLSLDDILMSHEKLPVRTETAMPRLGAFFLERSAGAETDNAVPQGSKLELPLWLAKGLFDNKRRILSVELPKIYQEGWRTVFSADPNVVDLHKMGPHFYGFGSQLLHFDSPENADISQSLLQTFIGRFRRIMDSSQNAYNEDTSALVARLDEMERGLFQTGQKGLNDFQCWEKGQASQITASNLVQNYKKRKFTDMED

SEQ ID NO: 19 - DNA, 1568 bp, Homo sapien
gtttacgtctcgctccggggcggaaagtgggtcagggccgggctggcggagcgcgcagcgggggctgcagattctttccaccatggccagacgcccccggaacagcagggcctggcacttcgtcctgagtgcagcccgccgagacgcagatgcccgggccgtggctctagcgaggcctccttctgtagcagcctgcactcggcccaccggggcagggactgccgctgcggagaggaagacgagtgtgagcgtggggcccagcccctgctgggactgcactgcgggcgggcctgggggtgggcagggcagagccccatggagctctcagggctgccccagcctgggcctctcttgcagatttcgactgggtctgggatgacttaaataagtcatcagccaccctgctgagctgtgacaaccgtaaggtcagcttccacatggagtacagctgcggcacagcggccatccggggcaccaaggagctgggggagggccagcacttctgggagatcaagatgacctctcccgtctacggcacactcacctttttcaagaacaggaagtgtataggtgtggcagccaccaagctgcagaacaagagattctacccgatggtgtgctccacggcggcccggagcagcatgaaggtcacccgctcctgtgccagcgccacttccctccagtacctgtgctgccaccgcctgcgccagctgcggccagactcgggagacacgctggagggtctgccgctgccgccgggcctcaagcaggtgctacacaacaagctgggctgggtcctgagcatgagttgcagccgccgcaaggctccagtgtccgatccccaggcagcgacctccgcccaccccagcagtcgcgagcctcggccctgccagaggaagcgctgccgccggacctgactgacttcccagtggaactgccttcttgggctggggcagcccctttcctctgtcccttctttctctgtcccttccttccagccacactccagggcggagttggatgaggcccgtccggagggagccatctcttgctcccgaggctgggacagtcctttctgtgggggctctagggcccctctgctgctgtgctgggtggggaagcggctgccctgagccccaggtcttgtgggaggctgcgaggacgagagcctggctggagcccgcgttgctgttcctagatggtgggcatcgggacgtcggatgtggacctggacaaataccgccacacgttctgcagcctgctgggcagggatgaggacagctggggcctctcctacacgggtgcgtgaggcccagggtggggcggggccgagcctggagctcccgggctcactgcgaccctggctgcccccaggcctcctccaccacaagggcgacaagaccagcttctcgtcgcggttcggccagggctccatcattggcgtgcacctggacacctggcacggcacactcacctttttcctaacttgctctgcatgctgtcagcggctgccccgccgtcatagacttaaaggactgcaataaatgtagagttgatgtctaacaccc

SEQ ID NO: 20 - protein, 159 aa, Homo sapien
MEYSCGTAAIRGTKELGEGQHFWEIKMTSPVYGTLTFFKNRKCIGVAATKLQNKRFYPMVCSTAARSSMKVTRSCASATSLQYLCCHRLRQLRPDSGDTLEGLPLPPGLKQVLHNKLGWVLSMSCSRRKAPVSDPQAATSAHPSSREPRPCQRKRCRRT

SEQ ID NO: 21 - DNA, 1956 bp, Homo sapien
agaaatcaactgcttagccgggttgttaggaggatctgatgagactaggatgtgagttgaaactgctgtgccaggcacacctgtgtgggtctcacttgtgccaggcatacctgcgtgggtctcacctgtgtaggtctcacctgtgccaggtgtacctgtgtgggtcttacctgtgcaggtctcctgatgcaggtctcacctgtgccgagtgtacctacctgtgcgggtctcacctgtgtcaggcgtacgtgtaggggtctcacctgtgaacgtctcacctgtgccaggtgtatacctgtgtggctctcacttgtgtgggtctggtatgtgacaaaggcctgggaattggcagctgtcatctgccaggagcagaccctgagccaagttccctgtgccttaggctcatttcatgccctcagctctgggaggccaatccctttactgccacattttataaatggaagactgaggttaagcagtgggcccagggccatagaacagctgagctgtggagctggacatcgaccttgggcaggtgctgccaggggcctgagcccaggccctccactcccgcatcctctgatgacccatcctgggtgagtggaggcatctgcccgcgccagtcaggcccagtggtgatggcccccatgcccacaggacagaagctgctggactcactggcagagacctgggacttcttcttcagtgacgtgctgcccatgctgcaggccatcttctacccggtgcagggcaaggagccatcggtgcgccagctggccctgctgcacttccggaatgccatcaccctcagtgtgaagctagaggatgcgctggcccgggcccatgcccgcgtgccccctgccatcgtgcagatgctgctggtgctgcagggggtacatgagtccaggggcgtgactgaggactacctgcgcctggagacgctggtccagaaggtggtgtcgccatacctgggcacctacggcctccactccagcgaggggcccttcacccattcctgcatcctggaaaagcgcctcctccgccgctcccgctcgggggacgtgctggccaagaaccctgtggtgcgctccaagagctacaacacgcctctgctgaaccccgtgcaggagcacgaggcggagggcgcggcggccggcggtaccagcatccgctggcactctgtgtcggagatgacgtcctgccccgagcctcagggcttctccgacccgcccggccagggccccaccgggaccttcaggtcctccccggcgccccactcagggccctgccccagcagactgtaccccacgacccagccccctgagcagggcttggatcccacccgcagctccctgccccgctccagcccggagaacctggtggaccagatcctggagtccgtggactcggattctgaagggattttcattgactttggccggggccggggctctggcatgtccgacttggagggctctgggggccggcagagtgtcgtgtgaggcctcacagctggccttgagtttttactgacacgtccctgtgtgcgggggtgtccatgtggcgtgtgtgtgagtgagacttttttactgcgtcccgtcccgccagccctgtcggcctcgtcactggccttggtcactttgtatttctgtcttggttggaaataccatcagccttccttgctcggcccaggtctgtttcaggcatctgagtcagcgtttacccaggggccgggccagagacgggggccggccgctcgctcccacgctcctcctgccccagccctctggtgtccacacctgcccacagagaatgtaaacccagtgggctctgcccacgccgggccccaaagtgaccagactccagcacacctgtctcctcctgcctggggtggccatggggatggaagggggtggaataaaacctgtcaacctgaaaaaaaaaaaaaaaaaaaaa

SEQ ID NO: 22 - protein, 287 aa, Homo sapien [sequence omitted]

SEQ ID NO: 23 - DNA, 1695 bp, Homo sapien
gttgccgctgcgcacctggctcaggtgagctgccccgcccccgcccggcgcgagccccaggtcctggcagcagcccctgacctgtccaggtgccctgtccagctgactgcaaggacagagaggagtcctgcccagctcttggatcagtctgctggccgaggagcccggtggagccaggggtgaccctggagcccagcctgccccgaggaggccccggctcagagccatgccaggtgtctgtgatagggcccctgacttcctctccccgtctgaagaccaggtgctgaggcctgccttgggcagctcagtggctctgaactgcacggcttgggtagtctctgggccccactgctccctgccttcagtccagtggctgaaagacgggcttccattgggaattgggggccactacagcctccacgagtactcctgggtcaaggccaacctgtcagaggtgcttgtgtccagtgtcctgggggtcaacgtgaccagcactgaagtctatggggccttcacctgctccatccagaacatcagcttctcctccttcactcttcagagagctggccctacaagccacgtggctgcggtgctggcctccctcctggtcctgctggccctgctgctggccgccctgctctatgtcaagtgccgtctcaacgtgctgctctggtaccaggacgcgtatggggaggtggagataaacgacgggaagctctacgacgcctacgtctcctacagcgactgccccgaggaccgcaagttcgtgaacttcatcctaaagccgcagctggagcggcgtcggggctacaagctcttcctggacgaccgcgacctcctgccgcgcgctgagccctccgccgacctcttggtgaacctgagccgctgccgacgcctcatcgtggtgctttcggacgccttcctgagccgggcctggtgcagccacagcttccgggagggcctgtgccggctgctggagctcacccgcagacccatcttcatcaccttcgagggccagaggcgcgaccccgcgcacccggcgctccgcctgctgcgccagcaccgccacctggtgaccttgctgctctggaggcccggctccgtgactccttcctccgatttttggaaagaagtgcagctggcgctgccgcggaaggtgcggtacaggccggtggaaggagacccccagacgcagctgcaggacgacaaggaccccatgctgattcttcgaggccgagtccctgagggccgggccctggactcagaggtggacccggaccctgagggcgacctgggtgtccgggggcctgtttttggagagccatcagctccaccgcacaccagtggggtctcgctgggagagagccggagcagcgaagtggacgtctcggatctcggctcgcgaaactacagtgcccgcacagacttctactgcctggtgtccaaggatgatatgtagctcccaccccagagtgcaggatcatagggacagcgggggccagggcagcggcgtcgctcctctgctcaacaggaccacaacccctgccagcagccctgggaccctgccagcagccctgggaaaaggctgtggcctcagggcgcctcccagtgccagaaaataaagtccttttggattctgaaaaaaaaaaaaaaaaaaaaaaaaaaaaaaaaaaaaaaaaaaaaaaaaaaaaaaaa

SEQ ID NO: 24 - protein, 410 aa, Homo sapien
MPGVCDRAPDFLSPSEDQVLRPALGSSVALNCTAWVVSGPHCSLPSVQWLKDGLPLGIGGHYSLHEYSWVKANLSEVLVSSVLGVNVTSTEVYGAFTCSIQNISFSSFTLQRAGPTSHVAAVLASLLVLLALLLAALLYVKCRLNVLLWYQDAYGEVEINDGKLYDAYVSYSDCPEDRKFVNFILKPQLERRRGYKLFLDDRDLLPRAEPSADLLVNLSRCRRLIVVLSDAFLSRAWCSHSFREGLCRLLELTRRPIFITFEGQRRDPAHPALRLLRQHRHLVTLLLWRPGSVTPSSDFWKEVQLALPRKVRYRPVEGDPQTQLQDDKDPMLILRGRVPEGRALDSEVDPDPEGDLGVRGPVFGEPSAPPHTSGVSLGESRSSEVDVSDLGSRNYSARTDFYCLVSKDDM

SEQ ID NO: 25 - DNA, 2811 bp, Homo sapien
ggcacgaggggagcgcttgtttgctgcctcgtactcctccatttatccgccatgataagtgccagccgagctgcagcagcccgtctcgtgggcgccgcagcctcccggggccctacggccgcccgccaccaggatagctggaatggccttagtcatgaggcttttagacttgtttcaaggcgggattatgcatcagaagcaatcaagggagcagttgttggtattgatttgggtactaccaactcctgcgtggcagttatggaaggtaaacgagcaaaggtgctggagaatgccgaaggtgccagaaccaccccttcagttgtggcctttacagcagatggtgagcgacttgttggaatgccggccaagcgacaggctgtcaccaacccaaacaatacattttatgctaccaagcgtctcattggccggcgatatgatgatcctgaagtacagaaagacattaaaaatgttccctttaaaattgtccgtgcctccaatggtgatgcctgggttgaggctcatgggaaattgtattctccgagtcagattggagcatttgtgttgatgaagatgaaagagactgcagaaaattacttggggcgcacagcaaaaaatgctgtgatcacagtcccagcttatttcaatgactcgcagagacaggccactaaagatgctggccagatatctggactgaatgtgcttcgggtgattaatgagcccacagctgctgctcttgcctatggtctagacaaatcagaagacaaagtcattgctgtatatgatttaggtggtggaacttttgatatttctatcctggaaattcagaaaggagtatttgaggtgaaatccacaaatggggataccttcttaggtggggaagactttgaccaggccttgctacggcacattgtgaaggagttcaagagagagacaggggttgatttgactaaagacaacatggcacttcagagggtacgggaagctgctgaaaaggctaagtgtgaactctcctcatctgtgcagactgacatcaatttgccctatcttacaatggattcttctggacccaagcatttgaatatgaagttgacccgtgctcaatttgaagggattgtcactgatctaatcagaaggactatcgctccatgccaaaaagctatgcaagatgcagaagtcagcaagagtgacataggagaagtgattcttgtgggtggcatgactaggatgcccaaggttcagcagactgtacaggatctttttggcagagccccaagtaaagctgtcaatcctgatgaggctgtggccattggagctgccattcagggaggtgtgttggccggcgatgtcacggatgtgctgctccttgatgtcactcccctgtctctgggtattgaaactctaggaggtgtctttaccaaacttattaataggaataccactattccaaccaagaagagccaggtattctctactgccgctgatggtcaaacgcaagtggaaattaaagtgtgtcagggtgaaagagagatggctggagacaacaaactccttggacagtttactttgattggaattccaccagcccctcgtggagttcctcagattgaagttacatttgacattgatgccaatgggatagtacatgtttctgctaaagataaaggcacaggacgtgagcagcagattgtaatccagtcttctggtggattaagcaaagatgatattgaaaatatggttaaaaatgcagagaaatatgctgaagaagaccggcgaaagaaggaacgagttgaagcagttaatatggctgaaggaatcattcacgacacagaaaccaagatggaagaattcaaggaccaattacctgctgatgagtgcaacaagctgaaagaagagatttccaaaatgagggagctcctggctagaaaagacagcgaaacaggagaaaatattagacaggcagcatcctctcttcagcaggcatcattgaagctgttcgaaatggcatacaaaaagatggcatctgagcgagaaggctctggaagttctggcactggggaacaaaaggaagatcaaaaggaggaaaaacagtaataatagcagaaattttgaagccagaaggacaacatatgaagcttaggagtgaagagacttcctgagcagaaatgggcgaacttcagtctttttactgtgtttttgcagtattctatatataatttccttaatttgtaaatttagtgaccattagctagtgatcatttaatggacagtgattctaacagtataaagttcacaatattctatgtccctagcctgtcatttttcagctgcatgtaaaaggaggtaggatgaattgatcattataaagatttaactattttatgctgaagtgaccatattttcaaggggtgaaaccatctcgcacacagcaatgaaggtagtcatccatagacttgaaatgagaccacatatggggatgagatccttctagttagcctagtactgctgtactggcctgtatgtacatggggtccttcaactgaggccttgcaagtcaagctggctgtgccatgtttgtagatggggcagaggaatctagaacaatgggaaacttagctatttatattaggtacagctattaaaacaaggtaggaatgaggctagacctttaacttccctaaggcatacttttctagctaccttctgccctgtgtctggcacctacatccttgatgattgttctcttacccattctggaattttttttttttttaaataaatacagaaagcatcttgaaaaaaaaaaaaaaaaaa

SEQ ID NO: 26 - protein, 679 aa, Homo sapien
MISASRAAAARLVGAAASRGPTAARHQDSWNGLSHEAFRLVSRRDYASEAIKGAVVGIDLGTTNSCVAVMEGKRAKVLENAEGARTTPSVVAFTADGERLVGMPAKRQAVTNPNNTFYATKRLIGRRYDDPEVQKDIKNVPFKIVRASNGDAWVEAHGKLYSPSQIGAFVLMKMKETAENYLGRTAKNAVITVPAYFNDSQRQATKDAGQISGLNVLRVINEPTAAALAYGLDKSEDKVIAVYDLGGGTFDISILEIQKGVFEVKSTNGDTFLGGEDFDQALLRHIVKEFKRETGVDLTKDNMALQRVREAAEKAKCELSSSVQTDINLPYLTMDSSGPKHLNMKLTRAQFEGIVTDLIRRTIAPCQKAMQDAEVSKSDIGEVILVGGMTRMPKVQQTVQDLFGRAPSKAVNPDEAVAIGAAIQGGVLAGDVTDVLLLDVTPLSLGIETLGGVFTKLINRNTTIPTKKSQVFSTAADGQTQVEIKVCQGEREMAGDNKLLGQFTLIGIPPAPRGVPQIEVTFDIDANGIVHVSAKDKGTGREQQIVIQSSGGLSKDDIENMVKNAEKYAEEDRRKKERVEAVNMAEGIIHDTETKMEEFKDQLPADECNKLKEEISKMRELLARKDSETGENIRQAASSLQQASLKLFEMAYKKMASEREGSGSSGTGEQKEDQKEEKQ

SEQ ID NO: 27 - DNA, 2811 bp, Homo sapien; identical to SEQ ID NO: 25

SEQ ID NO: 28 - protein, 679 aa, Homo sapien; identical to SEQ ID NO: 26

SEQ ID NO: 29 - DNA, 2602 bp, Homo sapien
gccgtgtcgccaccatggctccgcaccgccccgcgcccgcgctgctttgcgcgctgtccctggcgctgtgcgcgctgtcgctgcccgtccgcgcggccactgcgtcgcggggggcgtcccaggcgggggcgccccaggggcgggtgcccgaggcgcggcccaacagcatggtggtggaacaccccgagttcctcaaggcagggaaggagcctggcctgcagatctggcgtgtggagaagttcgatctggtgcccgtgcccaccaacctttatggagacttcttcacgggcgacgcctacgtcatcctgaagacagtgcagctgaggaacggaaatctgcagtatgacctccactactggctgggcaatgagtgcagccaggatgagagcggggcggccgccatctttaccgtgcagctggatgactacctgaacggccgggccgtgcagcaccgtgaggtccagggcttcgagtcggccaccttcctaggctacttcaagtctggcctgaagtacaagaaaggaggtgtggcatcaggattcaagcacgtggtacccaacgaggtggtggtgcagagactcttccaggtcaaagggcggcgtgtggtccgtgccaccgaggtacctgtgtcctgggagagcttcaacaatggcgactgcttcatcctggacctgggcaacaacatccaccagtggtgtggttccaacagcaatcggtatgaaagactgaaggccacacaggtgtccaagggcatccgggacaacgagcggagtggccgggcccgagtgcacgtgtctgaggagggcactgagcccgaggcgatgctccaggtgctgggccccaagccggctctgcctgcaggtaccgaggacaccgccaaggaggatgcggccaaccgcaagctggccaagctctacaaggtctccaatggtgcagggaccatgtccgtctccctcgtggctgatgagaaccccttcgcccagggggccctgaagtcagaggactgcttcatcctggaccacggcaaagatgggaaaatctttgtctggaaaggcaagcaggcaaacacggaggagaggaaggctgccctcaaaacagcctctgacttcatcaccaagatggactaccccaagcagactcaggtctcggtccttcctgagggcggtgagaccccactgttcaagcagttcttcaagaactggcgggacccagaccagacagatggcctgggcttgtcctacctttccagccatatcgccaacgtggagcgggtgcccttcgacgccgccaccctgcacacctccactgccatggccgcccagcacggcatggatgacgatggcacaggccagaaacagatctggagaatcgaaggttccaacaaggtgcccgtggaccctgccacatatggacagttctatggaggcgacagctacatcattctgtacaactaccgccatggtggccgccaggggcagataatctataactggcagggtgcccagtctacccaggatgaggtcgctgcatctgccatcctgactgctcagctggatgaggagctgggaggtacccctgtccagagccgtgtggtccaaggcaaggagcccgcccacctcatgagcctgtttggtgggaagcccatgatcatctacaagggcggcacctcccgcgagggcgggcagacagcccctgccagcacccgcctcttccaggtccgcgccaacagcgctggagccacccgggctgttgaggtattgcctaaggctggtgcactgaactccaacgatgcctttgttctgaaaaccccctcagccgcctacctgtgggtgggtacaggagccagcgaggcagagaagacgggggcccaggagctgctcagggtgctgcgggcccaacctgtgcaggtggcagaaggcagcgagccagatggcttctgggaggccctgggcgggaaggctgcctaccgcacatccccacggctgaaggacaagaagatggatgcccatcctcctcgcctctttgcctgctccaacaagattggacgttttgtgatcgaagaggttcctggtgagctcatgcaggaagacctggcaacggatgacgtcatgcttctggacacctgggaccaggtctttgtctgggttggaaaggattctcaagaagaagaaaagacagaagccttgacttctgctaagcggtacatcgagacggacccagccaatcgggatcggcggacgcccatcaccgtggtgaagcaaggctttgagcctccctcctttgtgggctggttccttggctgggatgatgattactggtctgtggaccccttggacagggccatggctgagctggctgcctgaggaggggcagggcccacccatgtcaccggtcagtgccttttggaactgtccttccctcaaagaggccttagagcgagcagagcagctctgctatgagtgtgtgtgtgtgtgtgtgttgtttcttttttttttttttacagtatccaaaaatagccctgcaaaaattcagagtccttgcaaaattgtctaaaatgtcagtgtttgggaaattaaatccaataaaaacattttgaagtgtg

SEQ ID NO: 30 - protein, 782 aa, Homo sapien
MAPHRPAPALLCALSLALCALSLPVRAATASRGASQAGAPQGRVPEARPNSMVVEHPEFLKAGKEPGLQIWRVEKFDLVPVPTNLYGDFFTGDAYVILKTVQLRNGNLQYDLHYWLGNECSQDESGAAAIFTVQLDDYLNGRAVQHREVQGFESATFLGYFKSGLKYKKGGVASGFKHVVPNEVVVQRLFQVKGRRVVRATEVPVSWESFNNGDCFILDLGNNIHQWCGSNSNRYERLKATQVSKGIRDNERSGRARVHVSEEGTEPEAMLQVLGPKPALPAGTEDTAKEDAANRKLAKLYKVSNGAGTMSVSLVADENPFAQGALKSEDCFILDHGKDGKIFVWKGKQANTEERKAALKTASDFITKMDYPKQTQVSVLPEGGETPLFKQFFKNWRDPDQTDGLGLSYLSSHIANVERVPFDAATLHTSTAMAAQHGMDDDGTGQKQIWRIEGSNKVPVDPATYGQFYGGDSYIILYNYRHGGRQGQIIYNWQGAQSTQDEVAASAILTAQLDEELGGTPVQSRVVQGKEPAHLMSLFGGKPMIIYKGGTSREGGQTAPASTRLFQVRANSAGATRAVEVLPKAGALNSNDAFVLKTPSAAYLWVGTGASEAEKTGAQELLRVLRAQPVQVAEGSEPDGFWEALGGKAAYRTSPRLKDKKMDAHPPRLFACSNKIGRFVIEEVPGELMQEDLATDDVMLLDTWDQVFVWVGKDSQEEEKTEALTSAKRYIETDPANRDRRTPITVVKQGFEPPSFVGWFLGWDDDYWSVDPLDRAMAELAA

SEQ ID NO: 31 - DNA, 1656 bp, Mus musculus
cgcccctgctctcgcgccggcgtcggctgcgtctccggcgtttgaattgcgcttccgccatctttccagcctcagtcggacgggcgcggaggcgcttctggaaggaacgccgcgatggctgcgcagggagagccccaggtccagttcaaacttgtattggttggtgatggtggtactggaaaaacgaccttcgtgaaacgtcatttgactggtgaatttgagaagaagtatgtagccaccttgggtgttgaggttcatcccctagtgttccacaccaacagaggacctattaagttcaatgtatgggacacagccggccaggagaaattcggtggactgagagatggctattatatccaagcccagtgtgccatcataatgtttgatgtaacatcgagagttacttacaagaatgtgcctaactggcatagagatctggtacgagtgtgtgaaaacatccccattgtgttgtgtggcaacaaagtggatattaaggacaggaaagtgaaggcgaaatccattgtcttccaccgaaagaagaatcttcagtactacgacatttctgccaaaagtaactacaactttgaaaagcccttcctctggcttgctaggaagctcattggagaccctaacttggaatttgttgccatgcctgctctcgccccaccagaagttgtcatggacccagctttggcagcacagtatgagcacgacttagaggttgctcagacaactgctctcccggatgaggatgatgacctgtgagaatgaagctggagcccagcgtcagaagtctagttttataggcagctgtcctgtgatgtcagcggtgcagcgtgtgtgccacctcattattatctagctaagcggaacatgtgctttatctgtgggatgctgaaggagatgagtgggcttcggagtgaatgtggcagtttaaaaaataacttcattgtttggacctgcatatttagctgtttggacgcagttgattccttgagtttcatatataagactgctgcagtcacatcacaatattcagtggtgaaatcttgtttgttactgtcattcccattccttttctttagaatcagaataaagttgtatttcaaatatctaagcaagtgaactcatcccttgtttataaatagcatttggaaaccactaaagtagggaagttttatgccatgttaatatttgaattgccttgcttttatcacttaatttgaaatctattgggttaatttctccctatgtttatttttgtacatttgagccatgtcacacaaactgatgatgacaggtcagcagtattctatttggttagaagggttacatggtgtaaatattagtgcagttaagctaaagcagtgtttgctccaccttcatattggctaggtagggtcacctagggaagcacttgctcaaaatctgtgacctgtcagaataaaaatgtggtttgtacatatcaaatagatattttaagggtaatattttcttttatggcaaaagtaatcatgttttaatgtagaacctcaaacaggatggaacatcagtggatggcaggaggttgggaattcttgctgttaaaaataattacaaattttgcactttttgtttgaatgttagatgcttagtgtgaagttgatacgcaagccg

SEQ ID NO: 32 - protein, 216 aa, Mus musculus
MAAQGEPQVQFKLVLVGDGGTGKTTFVKRHLTGEFEKKYVATLGVEVHPLVFHTNRGPIKFNVWDTAGQEKFGGLRDGYYIQAQCAIIMFDVTSRVTYKNVPNWHRDLVRVCENIPIVLCGNKVDIKDRKVKAKSIVFHRKKNLQYYDISAKSNYNFEKPFLWLARKLIGDPNLEFVAMPALAPPEVVMDPALAAQYEHDLEVAQTTALPDEDDDL

SEQ ID NO: 33 - DNA, 2828 bp, Homo sapien
ggcacgaggcgcccgcctgctacgagtagaacgctgtccgcagcttgcgcatttcgcagccgctgccgcctcgccgctgctccttcgtaaggccacttccgcacaccgacaccaacatgaacggacagctcaacggcttccacgaggcgttcatcgaggagggcacattccttttcacctcagagtcggtcggggaaggccacccagataagatttgtgaccaaatcagtgatgctgtccttgatgcccaccttcagcaggatcctgatgccaaagtagcttgtgaaactgttgctaaaactggaatgatccttcttgctggggaaattacatccagagctgctgttgactaccagaaagtggttcgtgaagctgttaaacacattggatatgatgattcttccaaaggttttgactacaagacttgtaacgtgctggtagccttggagcaacagtcaccagatattgctcaaggtgttcatcttgacagaaatgaagaagacattggtgctggagaccagggcttaatgtttggctatgccactgatgaaactgaggagtgtatgcctttaaccattgtcttggcacacaagctaaatgccaaactggcagaactacgccgtaatggcactttgccttggttacgccctgattctaaaactcaagttactgtgcagtatatgcaggatcgaggtgctgtgcttcccatcagagtccacacaattgttatatctgttcagcatgatgaagaggtttgtcttgatgaaatgagggatgccctaaaggagaaagtcatcaaagcagttgtgcctgcgaaataccttgatgaggatacaatctaccacctacagccaagtggcagatttgttattggtgggcctcagggtgatgctggtttgactggacgcaaaatcattgtggacacttatggcggttggggtgctcatggaggaggtgccttttcaggaaaggattataccaaggtcgaccgttcagctgcttatgctgctcgttgggtggcaaaatcccttgttaaaggaggtctgtgccggagggttcttgttcaggtctcttatgctattggagtttctcatccattatctatctccattttccattatggtacctctcagaagagtgagagagagctattagagattgtgaagaagaatttcgatctccgccctggggtcattgtcagggatctggatctgaagaagccaatttatcagaggactgcagcctatggccactttggtagggacagcttcccatgggaagtgcccaaaaagcttaaatattgaaagtgttagccttttttccccagacttgttggcgtaggctacagagaagccttcaagctctgagggaaagggccctccttcctaaattttcctgtcctctttcagctcctgaccagttgcagtcactctagtcaatgacatgaattttagcttttgtgggggactgtaagttgggcttgctattctgtccctaggtgttttgttcaccattataatgaatttagtgagcataggtgatccatgtaactgcctagaaacaacactgtagtaaataatgctttgaaattgaacctttgtgccctatcacccaacgctccaaagtcataattgcattgactttccccaccagatgctgaaaatgtccttgtgatgtgcacgtaaagtacttgtagttccacttatagcctctgtctggcaatgccacagccctgtcagcatgaatttgtaatgtcttgagctctattatgaatgtgaagccttccccttatcctccctgtaacttgatccatttctaattatgtagctctttgtcagggagtgttccctatccaatcaatcttgcatgtaacgcaagttcccagttggagctccagcctgacatcaaaaaaggcagttaccattaaaccatctccctggtgcttatgctcttaattgccacctctaacagcaccaaatcaaaatctctccactttcagctgtcttttggaggacgtacgtaataaggttttaatttagtaaaccaatcctatgcatggtttcagcactagccaaacctcaccaactcctagttctagaaaaacaggcacttggcagccttgtgatgtcatacagagaagtcacagggcagtacctgagggtctgtaggttgcacactttggtaccagataacttttttttttctttataagaaagcctgagtactccacactgcacaataactcctcccagggttttaactttgttttattttcaaaaccaggtccaatgagctttctgaacagctggtgtagctacagagaaaccagcttccttcagagagcagtgcttttggcggggaggaggaaatcccttcatacttgaacgttttctaattgcttatttattgtattctggggtatggcgtaagtacagagaagccatcacctcagatggcagcttttaaaagattttttttttttctctcaacaccatgattcctttaacaacatgtttccagcattcccaggtaggccaaggtgtcctacagaaaaaccttgggttagacctacagggggtctggctggtgttaacagaagggagggcagagctggtgcggctggccatggagaaagctgacttggctggtgtggtacagagaagccagcttgtttacatgcttattccatgactgcttgccctaagcagaaagtgcctttcaggatctatttttggaggtttattacgtatgtctggttctcaattccaacagtttaatgaagatctaaataaaatgctaggttctaccttaaaaaaaaaaaaaaaaaa

SEQ ID NO: 34 - protein, 395 aa, Homo sapien
MNGQLNGFHEAFIEEGTFLFTSESVGEGHPDKICDQISDAVLDAHLQQDPDAKVACETVAKTGMILLAGEITSRAAVDYQKVVREAVKHIGYDDSSKGFDYKTCNVLVALEQQSPDIAQGVHLDRNEEDIGAGDQGLMFGYATDETEECMPLTIVLAHKLNAKLAELRRNGTLPWLRPDSKTQVTVQYMQDRGAVLPIRVHTIVISVQHDEEVCLDEMRDALKEKVIKAVVPAKYLDEDTIYHLQPSGRFVIGGPQGDAGLTGRKIIVDTYGGWGAHGGGAFSGKDYTKVDRSAAYAARWVAKSLVKGGLCRRVLVQVSYAIGVSHPLSISIFHYGTSQKSERELLEIVKKNFDLRPGVIVRDLDLKKPIYQRTAAYGHFGRDSFPWEVPKKLKY

SEQ ID NO: 35 - DNA, 2828 bp, Homo sapien; identical to SEQ ID NO: 33

SEQ ID NO: 36 - protein, 395 aa, Homo sapien; identical to SEQ ID NO: 34

SEQ ID NO: 37 - DNA, 2062 bp, Homo sapien
gtcagtccctcctgtagccgccgccgccgccgcccgccgcccctctgccagcagctccggcgccacctcgggccggcgtctccggcgggcgggagccaggcgctgacgggcgcggcgggggcggccgagcgctcctgcggctgcgactcaggctccggcgtctgcgcttccccatggggctggcctgcggcgcctgggcgctctgagattgtcactgctgttccaagggcacacgcagagggatttggaattcctggagagttgcctttgtgagaagctggaaatatttctttcaattccatctcttagttttccataggaacatcaagaaatcatgaacaactttggtaatgaagagtttgactgccacttcctcgatgaaggttttactgccaaggacattctggaccagaaaattaatgaagtttcttcttctgatgataaggatgccttctatgtggcagacctgggagacattctaaagaaacatctgaggtggttaaaagctctccctcgtgtcacccccttttatgcagtcaaatgtaatgatagcaaagccatcgtgaagacccttgctgctaccgggacaggatttgactgtgctagcaagactgaaatacagttggtgcagagtctgggggtgcctccagagaggattatctatgcaaatccttgtaaacaagtatctcaaattaagtatgctgctaataatggagtccagatgatgacttttgatagtgaagttgagttgatgaaagttgccagagcacatcccaaagcaaagttggttttgcggattgccactgatgattccaaagcagtctgtcgtctcagtgtgaaattcggtgccacgctcagaaccagcaggctccttttggaacgggcgaaagagctaaatatcgatgttgttggtgtcagcttccatgtaggaagcggctgtaccgatcctgagaccttcgtgcaggcaatctctgatgcccgctgtgtttttgacatgggggctgaggttggtttcagcatgtatctgcttgatattggcggtggctttcctggatctgaggatgtgaaacttaaatttgaagagatcaccggcgtaatcaacccagcgttggacaaatactttccgtcagactctggagtgagaatcatagctgagcccggcagatactatgttgcatcagctttcacgcttgcagttaatatcattgccaagaaaattgtattaaaggaacagacgggctctgatgacgaagatgagtcgagtgagcagacctttatgtattatgtgaatgatggcgtctatggatcatttaattgcatactctatgaccacgcacatgtaaagccccttctgcaaaagagacctaaaccagatgagaagtattattcatccagcatatggggaccaacatgtgatggcctcgatcggattgttgagcgctgtgacctgcctgaaatgcatgtgggtgattggatgctctttgaaaacatgggcgcttacactgttgctgctgcctctacgttcaatggcttccagaggccgacgatctactatgtgatgtcagggcctgcgtggcaactcatgcagcaattccagaaccccgacttcccacccgaagtagaggaacaggatgccagcaccctgcctgtgtcttgtgcctgggagagtgggatgaaacgccacagagcagcctgtgcttcggctagtattaatgtgtagatagcactctggtagctgttaactgcaagtttagcttgaattaagggatttggggggaccatgtaacttaattactgctagttttgaaatgtctttgtaagagtagggtcgccatgatgcagccatatggaagactaggatatgggtcacacttatctgtgttcctatggaaactatttgaatatttgttttatatggatttttattcactcttcagacacgctactcaagagtgcccctcagctgctgaacaagcatttgtagcttgtacaatggcagaatgggccaaaagcttagtgttgtgacctgtttttaaaataaagtatcttgaaataattaggc

SEQ ID NO: 38 - protein, 461 aa, Homo sapien
MNNFGNEEFDCHFLDEGFTAKDILDQKINEVSSSDDKDAFYVADLGDILKKHLRWLKALPRVTPFYAVKCNDSKAIVKTLAATGTGFDCASKTEIQLVQSLGVPPERIIYANPCKQVSQIKYAANNGVQMMTFDSEVELMKVARAHPKAKLVLRIATDDSKAVCRLSVKFGATLRTSRLLLERAKELNIDVVGVSFHVGSGCTDPETFVQAISDARCVFDMGAEVGFSMYLLDIGGGFPGSEDVKLKFEEITGVINPALDKYFPSDSGVRIIAEPGRYYVASAFTLAVNIIAKKIVLKEQTGSDDEDESSEQTFMYYVNDGVYGSFNCILYDHAHVKPLLQKRPKPDEKYYSSSIWGPTCDGLDRIVERCDLPEMHVGDWMLFENMGAYTVAAASTFNGFQRPTIYYVMSGPAWQLMQQFQNPDFPPEVEEQDASTLPVSCAWESGMKRHRAACASASINV

SEQ ID NO: 39 - DNA, 2202 bp, Homo sapien
cacgcttgccgccgccccgcagaaatgcttcggttacccacagtctttcgccagatgagaccggtgtccagggtactggctcctcatctcactcgggcttatgccaaagatgtaaaatttggtgcagatgcccgagccttaatgcttcaaggtgtagaccttttagccgatgctgtggccgttacaatggggccaaagggaagaacagtgattattgagcagggttggggaagtcccaaagtaacaaaagatggtgtgactgttgcaaagtcaattgacttaaaagataaatacaagaacattggagctaaacttgttcaagatgttgccaataacacaaatgaagaagctggggatggcactaccactgctactgtactggcacgctctatagccaaggaaggcttcgagaagattagcaaaggtgctaatccagtggaaatcaggagaggtgtgatgttagctgttgatgctgtaattgctgaacttaaaaagcagtctaaacctgtgaccacccctgaagaaattgcacaggttgctacgatttctgcaaacggagacaaagaaattggcaatatcatctctgatgcaatgaaaaaagttggaagaaagggtgtcatcacagtaaaggatggaaaaacactgaatgatgaattagaaattattgaaggcatgaagtttgatcgaggctatatttctccatactttattaatacatcaaaaggtcagaaatgtgaattccaggatgcctatgttctgttgagtgaaaagaaaatttctagtatccagtccattgtacctgctcttgaaattgccaatgctcaccgtaagcctttggtcataatcgctgaagatgttgatggagaagctctaagtacactcgtcttgaataggctaaaggttggtcttcaggttgtggcagtcaaggctccagggtttggtgacaatagaaagaaccagcttaaagatatggctattgctactggtggtgcagtgtttggagaagagggattgaccctgaatcttgaagacgttcagcctcatgacttaggaaaagttggagaggtcattgtgaccaaagacgatgccatgctcttaaaaggaaaaggtgacaaggctcaaattgaaaaacgtattcaagaaatcattgagcagttagatgtcacaactagtgaatatgaaaaggaaaaactgaatgaacggcttgcaaaactttcagatggagtggctgtgctgaaggttggtgggacaagtgatgttgaagtgaatgaaaagaaagacagagttacagatgcccttaatgctacaagagctgctgttgaagaaggcattgttttgggagggggttgtgccctccttcgatgcattccagccttggactcattgactccagctaatgaagatcaaaaaattggtatagaaattattaaaagaacactcaaaattccagcaatgaccattgctaagaatgcaggtgttgaaggatctttgatagttgagaaaattatgcaaagttcctcagaagttggttatgatgctatggctggagattttgtgaatatggtggaaaaaggaatcattgacccaacaaaggttgtgagaactgctttattggatgctgctggtgtggcctctctgttaactacagcagaagttgtagtcacagaaattcctaaagaagagaaggaccctggaatgggtgcaatgggtggaatgggaggtggtatgggaggtggcatgttctaactcctagactagtgctttacctttattaatgaactgtgacaggaagcccaaggcagtgttcctcaccaataacttcagagaagtcagttggagaaaatgaagaaaaaggctggctgaaaatcactataaccatcagttactggtttcagttgacaaaatatataatggtttactgctgtcattgtccatgcctacagataatttattttgtatttttgaataaaaaacatttgtacattcctgatactgggtacaagagccatgtaccagtgtactgctttcaacttaaatcactgaggcatttttactactattctgttaaaatcaggattttagtgcttgccaccaccagatgagaagttaagcagcctttctgtggagagtgagaataattgtgtacaaagtagagaagtatccaattatgtgacaacctttgtgtaataaaaatttgtttaa

SEQ ID NO: 40 - protein, 573 aa, Homo sapien
MLRLPTVFRQMRPVSRVLAPHLTRAYAKDVKFGADARALMLQGVDLLADAVAVTMGPKGRTVIIEQGWGSPKVTKDGVTVAKSIDLKDKYKNIGAKLVQDVANNTNEEAGDGTTTATVLARSIAKEGFEKISKGANPVEIRRGVMLAVDAVIAELKKQSKPVTTPEEIAQVATISANGDKEIGNIISDAMKKVGRKGVITVKDGKTLNDELEIIEGMKFDRGYISPYFINTSKGQKCEFQDAYVLLSEKKISSIQSIVPALEIANAHRKPLVIIAEDVDGEALSTLVLNRLKVGLQVVAVKAPGFGDNRKNQLKDMAIATGGAVFGEEGLTLNLEDVQPHDLGKVGEVIVTKDDAMLLKGKGDKAQIEKRIQEIIEQLDVTTSEYEKEKLNERLAKLSDGVAVLKVGGTSDVEVNEKKDRVTDALNATRAAVEEGIVLGGGCALLRCIPALDSLTPANEDQKIGIEIIKRTLKIPAMTIAKNAGVEGSLIVEKIMQSSSEVGYDAMAGDFVNMVEKGIIDPTKVVRTALLDAAGVASLLTTAEVVVTEIPKEEKDPGMGAMGGMGGGMGGGMF

SEQ ID NO: 41 - DNA, 2202 bp, Homo sapien; identical to SEQ ID NO: 39

SEQ ID NO: 42 - protein, 573 aa, Homo sapien; identical to SEQ ID NO: 40

SEQ ID NO: 43 - DNA, 4552 bp, Homo sapien
agcgcccgccgcgtccggggccggctggtgcgcgagacgccgccgagagttgtgaagggcgcgggtggggggcgctgccggcctcgtgggtacgttcgtgccgcgtctgtcccagagctggggccgcaggagcggaggcaagaggggcactatggcagacaaagttaggaggcagaggccgaggaggcgagtctgttgggccttggtggctgtgctcttggcagacctgttggcactgagtgatacactggcagtgatgtctgtggacctgggcagtgagtccatgaaggtggccattgtcaaacctggagtgcccatggaaattgtcttgaataaggaatctcggaggaaaacaccggtgatcgtgaccctgaaagaaaatgaaagattctttggagacagtgcagcaagcatggcgattaagaatccaaaggctacgctacgttacttccagcacctcctggggaagcaggcagataacccccatgtagctctttaccaggcccgcttcccggagcacgagctgactttcgacccacagaggcagactgtgcactttcagatcagctcgcagctgcagttctcacctgaggaagtgttgggcatggttctcaattattctcgttctctagctgaagattttgcagagcagcccatcaaggatgcagtgatcaccgtgccagtcttcttcaaccaggccgagcgccgagctgtgctgcaggctgctcgtatggctggcctcaaagtgctgcagctcatcaatgacaacaccgccactgccctcagctatggtgtcttccgccggaaagatattaacaccactgcccagaatatcatgttctatgacatgggctcaggcagcaccgtatgcaccattgtgacctaccagatggtgaagactaaggaagctgggatgcagccacagctgcagatccggggagtaggatttgaccgtaccctggggggcctggagatggagctccggcttcgagaacgcctggctgggcttttcaatgagcagcgcaagggtcagagagcaaaggatgtgcgggagaacccgcgtgccatggccaagctgctgcgtgaggctaatcggctcaaaaccgtcctcagtgccaacgctgaccacatggcacagattgaaggcctgatggatgatgtggacttcaaggcaaaagtgactcgtgtggaatttgaggagttgtgtgcagacttgtttgagcgggtgcctgggcctgtacagcaggccctccagagtgccgaaatgagtctggatgagattgagcaggtgatcctggtgggtggggccactcgggtccccagagttcaggaggtgctgctgaaggccgtgggcaaggaggagctggggaagaacatcaatgcagatgaagcagccgccatgggggcagtgtaccaggcagctgcgctcagcaaagcctttaaagtgaagccatttgtcgtccgagatgcagtggtctaccccatcctggtggagttcacgagggaggtggaggaggagcctgggattcacagcctgaagcacaataaacgggtactcttctctcggatggggccctaccctcaacgcaaagtcatcacctttaaccgctacagccatgatttcaacttccacatcaactacggcgacctgggcttcctggggcctgaagatcttcgggtatttggctcccagaatctgaccacagtgaagctaaaaggggtgggtgacagcttcaagaagtatcctgactacgagtccaagggcatcaaggctcacttcaacctggatgagagtggcgtgctcagtctagacagggtggagtctgtatttgagacactggtagaggacagcgcagaagaggaatctactctcaccaaacttggcaacaccatttccagcctgtttggaggcggtaccacaccagatgccaaggagaatggtactgatactgtccaggaggaagaggagagccctgcagaggggagcaaggacgagcctggggagcaggtggagctcaaggaggaagctgaggccccagtggaggatggctctcagcccccaccccctgaacctaagggagatgcaacccctgagggagaaaaggccacagaaaaagaaaatggggacaagtctgaggcccagaaaccaagtgagaaggcagaggcagggcctgagggcgtcgctccagccccagagggagagaagaagcagaagcccgccaggaagcggcgaatggtagaggagatcggggtggagctggttgttctggacctgcctgacttgccagaggataagctggctcagtcggtgcagaaacttcaggacttgacactccgagacctggagaagcaggaacgggaaaaagctgccaacagcttggaagcgttcatatttgagacccaggacaagctgtaccagcccgagtaccaggaagtgtccacagaggagcagcgtgaggagatctctgggaagctcagcgccgcatccacctggctggaggatgagggtgttggagccaccacagtgatgttgaaggagaagctggctgagctgaggaagctgtgccaagggctgttttttcgggtagaggagcgcaagaagtggcccgaacggctgtctgccctcgataatctcctcaaccattccagcatgttcctcaagggggcccggctcatcccagagatggaccagatcttcactgaggtggagatgacaacgttagagaaagtcatcaatgagacctgggcctggaagaatgcaactctggccgagcaggctaagctgcccgccacagagaagcctgtgttgctctcaaaagacattgaagctaagatgatggccctggaccgagaggtgcagtatctgctcaataaggccaagtttaccaagccccggccccggcctaaggacaagaatgggacccgggcagagccacccctcaatgccagtgccagtgaccagggggagaaggtcatccctccagcaggccagactgaagatgcagagcccatttcagaacctgagaaagtagagactggatccgagccaggagacactgagcctttggagttaggaggtcctggagcagaacctgaacagaaagaacaatcgacaggacagaagcggcctttgaagaacgacgaactataacccccacctctgttttccccattcatctccacccccttcccccaccacttctatttatttaacatcgagggttgggggaggggttggtcctgccctcggctggagttcctttctcacccctgtgatttggaggtgtggagaaggggaagggagggacagctcactggttccttctgcagtacctctgtggttaaaaatggaaactgttctcctccccagccccactccctgttccctacccatataggccctaaatttgggaaaaatcactattaatttctgaatcctttgcctgtgggtaggaagagaatggctgccagtggctgatgggtcccggtgatgggaagggtatcaggttgctggggagtttccactcttctctggtgattgttccttccctcccttcctctcccaccatgcgatgagcatcctttcaggccagtgtctgcagagcctcagttaccaggtttggtttctgagtgcctatctgtgctctttcctccctctgcgggcttctcttgctctgagcctcccttccccattcccatgcagctcctttccccctgggtttccttggcttcctgcagcaaattgggcagttctctgccccttgcctaaaagcctgtacctctggattggcggaagtaaatctggaaggattctcactcgtatttcccacccctagtggccagaggagggaggggcacagtgaagaagggagcccaccacctctccgaagaggaaagccacgtagagtggttggcatggggtgccagcatcgtgcaagctctgtcataatctgcatcttcccagcagcctggtaccccaggttcctgtaactccctgcctcctcctctcttctgctgttctgctcctcccagacagagcctttccctcaccccctgaccccctgggctgaccaaaatgtgctttctactgtgagtccctatcccaagatcctggggaaaggagagaccatggtgtgaatgtagagatgccacctccctctctctgaggcaggcctgtggatgaaggaggagggtcagggctggccttcctctgtgcatcactctgctaggttgggggcccccgacccaccatacctacgcctagggagcccgtcctccagtattccgtctgtagcaggagctagggctgctgcctcagctccaagacaagaatgaacctggctgtgtcagtcattttgtcttttcctttttttttttttgccacattggcagagatgggacctaagggtcccacccctcaccccacccccacctcttctgtatgtttgaattctttcagtagctgttgatgctggttggacaggtttgagtcaaattgtactttgctccattgttaattgagaaactgtttcaataaaatattcttttctac

SEQ ID NO: 44 - protein, 999 aa, Homo sapien
MADKVRRQRPRRRVCWALVAVLLADLLALSDTLAVMSVDLGSESMKVAIVKPGVPMEIVLNKESRRKTPVIVTLKENERFFGDSAASMAIKNPKATLRYFQHLLGKQADNPHVALYQARFPEHELTFDPQRQTVHFQISSQLQFSPEEVLGMVLNYSRSLAEDFAEQPIKDAVITVPVFFNQAERRAVLQAARMAGLKVLQLINDNTATALSYGVFRRKDINTTAQNIMFYDMGSGSTVCTIVTYQMVKTKEAGMQPQLQIRGVGFDRTLGGLEMELRLRERLAGLFNEQRKGQRAKDVRENPRAMAKLLREANRLKTVLSANADHMAQIEGLMDDVDFKAKVTRVEFEELCADLFERVPGPVQQALQSAEMSLDEIEQVILVGGATRVPRVQEVLLKAVGKEELGKNINADEAAAMGAVYQAAALSKAFKVKPFVVRDAVVYPILVEFTREVEEEPGIHSLKHNKRVLFSRMGPYPQRKVITFNRYSHDFNFHINYGDLGFLGPEDLRVFGSQNLTTVKLKGVGDSFKKYPDYESKGIKAHFNLDESGVLSLDRVESVFETLVEDSAEEESTLTKLGNTISSLFGGGTTPDAKENGTDTVQEEEESPAEGSKDEPGEQVELKEEAEAPVEDGSQPPPPEPKGDATPEGEKATEKENGDKSEAQKPSEKAEAGPEGVAPAPEGEKKQKPARKRRMVEEIGVELVVLDLPDLPEDKLAQSVQKLQDLTLRDLEKQEREKAANSLEAFIFETQDKLYQPEYQEVSTEEQREEISGKLSAASTWLEDEGVGATTVMLKEKLAELRKLCQGLFFRVEERKKWPERLSALDNLLNHSSMFLKGARLIPEMDQIFTEVEMTTLEKVINETWAWKNATLAEQAKLPATEKPVLLSKDIEAKMMALDREVQYLLNKAKFTKPRPRPKDKNGTRAEPPLNASASDQGEKVIPPAGQTEDAEPISEPEKVETGSEPGDTEPLELGGPGAEPEQKEQSTGQKRPLKNDEL

SEQ ID NO: 45 - DNA, 1692 bp, Homo sapien
atacacgtgccatgtgcagcatgaggggctacccgagcccgtcaccctgagatggaagccggcttcccagcccaccatccccatcgtgggcatcattgctggcctggttctccttggatctgtggtctctggagctgtggttgctgctgtgatatggaggaagaagagctcaggtggaaaaggagggagctactctaaggctgagtggagcgacagtgcccaggggtctgagtctcacagcttgtaaagcctgagacagctgccttgtgtgcgactgagatgcacagctgccttgtgtgcgactgagatgcaggatttcctcacgcctcccctatgtgtcttaggggactctggcttctctttttgcaagggcctctgaatctgtctgtgtccctgttagcacaatgtgaggaggtagagaaacagtccacctctgtgtctaccatgacccccttcctcacactgacctgtgttccttccctgttctcttttctattaaaaataagaacctgggcagagtgcggcagctcatgcctgtaatcccagcacttagggaggccgaggagggcagatcacgaggtcaggagatcgaaaccatcctggctaacacggtgaaaccccgtctctactaaaaaatacaaaaaattagctgggcgcagaggcacgggcctgtagtcccagctactcaggaggcggaggcaggagaatggcgtcaacccgggaggcggaggttgcagtgagccaggattgtgcgactgcactccagcctgggtgacagggtgaaacgccatctcaaaaaataaaaattaaaaaataaaaaaagaacctggatctcaatttaatttttcatattcttgcaatgaaatggacttgaggaagctaagatcatagctagaaatacagataattccacagcacatctctagcaaatttagcctattcctattctctagcctattccttaccacctgtaatcttgaccatataccttggagttgaatattgttttcatactgctgtggtttgaatgttccctccaacactcatgttgagacttaatccctaatgtggcaatactgaaaggtggggcctttgagatgtgattggatcgtaaggctgtgccttcattcatgggttaatggattaatgggttatcacaggaatgggactggtggctttataagaagaggaaaagagaactgagctagcatgcccaacccacagagagcctccactagagtgatgctaagtggaaatgtgaggtgcagctgccacagagggcccccaccagggaaatgtctagtgtctagtggatccaggccacaggagagagtgccttgtggagcgctgggagcaggacctgaccaccaccaggaccccagaactgtggagtcagtggcagcatgcagcgcccccttgggaaagctttaggcaccagcctgcaacccattcgagcagccacgtaggctcgacccagcaaagccacaggcacggggctacctgaggccttgggggccaatccctgctccagtgtgtccgtgaggcagcacacgaagtcaaaagagattatctcttcccacagataccttttctctcccatgaccctttaacagcatctgcttcattcccctcaccttcccaggctgatctgaggtaaactttgaagtaaaataaaagctgtgtttgagcatc

SEQ ID NO: 46 - DNA, 1783 bp, Homo sapien
cctctcggagctggaaatgcagctattgagatcttcgaatgctgcggagctggaggcggaggcagctggggaggtccgagcgatgtgaccaggccgccatcgctcgtctcttcctctctcctgccgcctcctgtgtcgaaaataacttttttagtctaaagaaagaaagacaaaagtagtcgtccgcccctcacgccctctcttcctctcagccttccgcccggtgaggaagcccggggtggctgctccgccgtcggggccgcgccgccgagccccagcgccccgggccgcccccgcacgccgcccccatgcatcccttctacacccgggccgccaccatgataggcgagatcgccgccgccgtgtccttcatctccaagtttctccgcaccaaggggctgacgagcgagcgacagctgcagaccttcagccagagcctgcaggagctgctggcagaacattataaacatcactggttcccagaaaagccatgcaagggatcgggttaccgttgtattcgcatcaaccataaaatggatcctctgattggacaggcagcacagcggattggactgagcagtcaggagctgttcaggcttctcccaagtgaactcacactctgggttgacccctatgaagtgtcctacagaattggagaggatggctccatctgtgtgctgtatgaagcctcaccagcaggaggtagcactcaaaacagcaccaacgtgcaaatggtagacagccgaatcagctgtaaggaggaacttctcttgggcagaacgagcccttccaaaaactacaatatgatgactgtatcaggttaagatatagtctgtggatggatcatctgatgatgatccataaatttgatttttgctttgggtgggctcctcttggggatggattatggaatttaaaccatgtcacagctgtgaagatctggcacaagatagaatggtaaaaaaaaaaaaaaattttaagtgacagtgccatagtttggacagtacctttcaatgattaattttaatagcctgtgagtccaagtaaatgatcactttatttgctagggagggaagtcctagggtggtttcagtttctcccagacatacctaaatttttacatcaatccttttaaagaaaatctgtatttcaaagaatctttctctgcagtaaatctcgcaggggaatttgcactattacacttgaaagttgttattgttaaccttttcggcagcttttaataggaaagttaaacgttttaaacatggtagtactggaaattttacaagacttttacctagcacttaaatatgtataaatgtacataaagacaaactagtaagcatgacctggggaaatggtcagaccttgtattgtgtttttggccttgaaagtagcaagtgaccagaatctgccatggcaacaggctttaaaaaagacccttaaaaagacactgtctcaactgtggtgttagcaccagccagctctctgtacatttgctagcttgtagttttctaagactgagtaaacttcttatttttagaaagtggaggtctggtttgtaactttccttgtacttaattgggtaaaagtcttttccacaaaccaccatctattttgtgaactttgttagtcatcttttatttggtaaattatgaactggtgtaaatttgtacagttcatgtatattgattgtggcaaagttgtacagatttctatattttggatgagaaatttttcttctctctataataaatcgtttcttatcttggcatttttaacc

SEQ ID NO: 47 - protein, 171 aa, Homo sapien
MHPFYTRAATMIGEIAAAVSFISKFLRTKGLTSERQLQTFSQSLQELLAEHYKHHWFPEKPCKGSGYRCIRINHKMDPLIGQAAQRIGLSSQELFRLLPSELTLWVDPYEVSYRIGEDGSICVLYEASPAGGSTQNSTNVQMVDSRISCKEELLLGRTSPSKNYNMMTVSG

SEQ ID NO: 48 - DNA, 2188 bp, Homo sapien
ggcacgaggaccgaccgcattgcggcttggttttctcacccagtgcatgtggcaggagcggtgagatcactgcctcacggcgatcctggactgacggtcacgactgcctaccctctaaccctgttctgagctgccccttgcccacacaccccaaacctgtgtgcaggatccgcctccatggagctacagcctcctgaagcctcgatcgccgtcgtgtcgattccgcgccagttgcctggctcacattcggaggctggtgtccagggtctcagcgcgggggacgactcagagttggggtctcactgtgttgcccagactggtctcgaactcttggcctcaggtgatcctcttccctcagcttcccagaatgccgagatgatagagacggggtctgactgtgttacccaggctggtcttcaactcttggcctcaagtgatcctcctgccttagcttccaagaatgctgaggttacaggcaccatgagccaggacaccgaggtggatatgaaggaggtggagctgaatgagttagagcccgagaagcagccgatgaacgcggcgtctggggcggccatgtccctggcgggagccgagaagaatggtctggtgaagatcaaggtggcggaagacgaggcggaggcggcagccgcggctaagttcacgggcctgtccaaggaggagctgctgaaggtggcaggcagccccggctgggtacgcacccgctgggcactgctgctgctcttctggctcggctggctcggcatgcttgctggtgccgtggtcataatcgtgcgagcgccgcgttgtcgcgagctaccggcgcagaagtggtggcacacgggcgccctctaccgcatcggcgaccttcaggccttccagggccacggcgcgggcaacctggcgggtctgaaggggcgtctcgattacctgagctctctgaaggtgaagggccttgtgctgggtccaattcacaagaaccagaaggatgatgtcgctcagactgacttgctgcagatcgaccccaattttggctccaaggaagattttgacagtctcttgcaatcggctaaaaaaaagagcatccgtgtcattctggaccttactcccaactaccggggtgagaactcgtggttctccactcaggttgacactgtggccaccaaggtgaaggatgctctggagttttggctgcaagctggcgtggatgggttccaggttcgggacatagagaatctgaaggatgcatcctcattcttggctgagtggcaaaatatcaccaagggcttcagtgaagacaggctcttgattgcggggactaactcctccgaccttcagcagatcctgagcctactcgaatccaacaaagacttgctgttgactagctcatacctgtctgattctggttctactggggagcatacaaaatccctagtcacacagtatttgaatgccactggcaatcgctggtgcagctggagtttgtctcaggcaaggctcctgacttccttcttgccggctcaacttctccgactctaccagctgatgctcttcaccctgccagggacccctgttttcagctacggggatgagattggcctggatgcagctgcccttcctggacagcctatggaggctccagtcatgctgtgggatgagtccagcttccctgacatcccaggggctgtaagtgccaacatgactgtgaagggccagagtgaagaccctggctccctcctttccttgttccggcggctgagtgaccagcggagtaaggagcgctccctactgcatggggacttccacgcgttctccgctgggcctggactcttctcctatatccgccactgggaccagaatgagcgttttctggtagtgcttaactttggggatgtgggcctctcggctggactgcaggcctccgacctgcctgccagcgccagcctgccagccaaggctgacctcctgctcagcacccagccaggccgtgaggagggctcccctcttgagctggaacgcctgaaactggagcctcacgaagggctgctgctccgcttcccctacgcggcctgacttcagcctgacatggacccactacccttctcctttccttcccaggccctttggcttctgatttttctcttttttaaaaacaaacaaacaaactgttgcaaaaaaaaaaaaaaaaaaa

SEQ ID NO: 49 - protein, 529 aa, Homo sapien
MSQDTEVDMKEVELNELEPEKQPMNAASGAAMSLAGAEKNGLVKIKVAEDEAEAAAAAKFTGLSKEELLKVAGSPGWVRTRWALLLLFWLGWLGMLAGAVVIIVRAPRCRELPAQKWWHTGALYRIGDLQAFQGHGAGNLAGLKGRLDYLSSLKVKGLVLGPIHKNQKDDVAQTDLLQIDPNFGSKEDFDSLLQSAKKKSIRVILDLTPNYRGENSWFSTQVDTVATKVKDALEFWLQAGVDGFQVRDIENLKDASSFLAEWQNITKGFSEDRLLIAGTNSSDLQQILSLLESNKDLLLTSSYLSDSGSTGEHTKSLVTQYLNATGNRWCSWSLSQARLLTSFLPAQLLRLYQLMLFTLPGTPVFSYGDEIGLDAAALPGQPMEAPVMLWDESSFPDIPGAVSANMTVKGQSEDPGSLLSLFRRLSDQRSKERSLLHGDFHAFSAGPGLFSYIRHWDQNERFLVVLNFGDVGLSAGLQASDLPASASLPAKADLLLSTQPGREEGSPLELERLKLEPHEGLLLRFPYAA

SEQ ID NO: 50 - DNA, 1899 bp, Homo sapien
gtccgtactgcagagccgctgccggagggtcgttttaaagggccgcgttgccgccccctcggcccgccatgctgctatccgtgccgctgctgctcggcctcctcggcctggccgtcgccgagcccgccgtctacttcaaggagcagtttctggacggagacgggtggacttcccgctggatcgaatccaaacacaagtcagattttggcaaattcgttctcagttccggcaagttctacggtgacgaggagaaagataaaggtttgcagacaagccaggatgcacgcttttatgctctgtcggccagtttcgagcctttcagcaacaaaggccagacgctggtggtgcagttcacggtgaaacatgagcagaacatcgactgtgggggcggctatgtgaagctgtttcctaatagtttggaccagacagacatgcacggagactcagaatacaacatcatgtttggtcccgacatctgtggccctggcaccaagaaggttcatgtcatcttcaactacaagggcaagaacgtgctgatcaacaaggacatccgttgcaaggatgatgagtttacacacctgtacacactgattgtgcggccagacaacacctatgaggtgaagattgacaacagccaggtggagtccggctccttggaagacgattgggacttcctgccacccaagaagataaaggatcctgatgcttcaaaaccggaagactgggatgagcgggccaagatcgatgatcccacagactccaagcctgaggactgggacaagcccgagcatatccctgaccctgatgctaagaagcccgaggactgggatgaagagatggacggagagtgggaacccccagtgattcagaaccctgagtacaagggtgagtggaagccccggcagatcgacaacccagattacaagggcacttggatccacccagaaattgacaaccccgagtattctcccgatcccagtatctatgcctatgataactttggcgtgctgggcctggacctctggcaggtcaagtctggcaccatctttgacaacttcctcatcaccaacgatgaggcatacgctgaggagtttggcaacgagacgtggggcgtaacaaaggcagcagagaaacaaatgaaggacaaacaggacgaggagcagaggcttaaggaggaggaagaagacaagaaacgcaaagaggaggaggaggcagaggacaaggaggatgatgaggacaaagatgaggatgaggaggatgaggaggacaaggaggaagatgaggaggaagatgtccccggccaggccaaggacgagctgtagagaggcctgcctccagggctggactgaggcctgagcgctcctgccgcagagcttgccgcgccaaataatgtctctgtgagactcgagaactttcatttttttccaggctggttcggatttggggtggattttggttttgttcccctcctccactctcccccaccccctccccgccctttttttttttttttttaaactggtattttatcctttgattctccttcagccctcacccctggttctcatctttcttgatcaacatcttttcttgcctctgtgccccttctctcatctcttagctcccctccaacctggggggcagtggtgtggagaagccacaggcctgagatttcatctgctctccttcctggagcccagaggagggcagcagaagggggtggtgtctccaaccccccagcactgaggaagaacggggctcttctcatttcacccctccctttctcccctgcccccaggactgggccacttctgggtggggcagtgggtcccagattggctcacactgagaatgtaagaactacaaacaaaatttctattaaattaaattttgtgtctc

SEQ ID NO: 51 - protein, 417 aa, Homo sapien
MLLSVPLLLGLLGLAVAEPAVYFKEQFLDGDGWTSRWIESKHKSDFGKFVLSSGKFYGDEEKDKGLQTSQDARFYALSASFEPFSNKGQTLVVQFTVKHEQNIDCGGGYVKLFPNSLDQTDMHGDSEYNIMFGPDICGPGTKKVHVIFNYKGKNVLINKDIRCKDDEFTHLYTLIVRPDNTYEVKIDNSQVESGSLEDDWDFLPPKKIKDPDASKPEDWDERAKIDDPTDSKPEDWDKPEHIPDPDAKKPEDWDEEMDGEWEPPVIQNPEYKGEWKPRQIDNPDYKGTWIHPEIDNPEYSPDPSIYAYDNFGVLGLDLWQVKSGTIFDNFLITNDEAYAEEFGNETWGVTKAAEKQMKDKQDEEQRLKEEEEDKKRKEEEEAEDKEDDEDKDEDEEDEEDKEEDEEEDVPGQAKDEL

SEQ ID NO: 52 - DNA, 6480 bp, Homo sapien
agagcgagcaggggagagcgagaccagttttaaggggaggaccggtgcgagtgaggcagccccgaggctctgctcgcccaccacccaatcctcgcctcccttctgctccaccttctctctctgccctcacctctcccccgaaaaccccctatttagccaaaggaaggaggtcaggggaacgctctcccctccccttccaaaaaacaaaaacagaaaaacccttttccaggccggggaaagcaggagggagaggggccgccgggctggccatggagctgctgtgccacgaggtggacccggtccgcagggccgtgcgggaccgcaacctgctccgagacgaccgcgtcctgcagaacctgctcaccatcgaggagcgctaccttccgcagtgctcctacttcaagtgcgtgcagaaggacatccaaccctacatgcgcagaatggtggccacctggatgctggaggtctgtgaggaacagaagtgcgaagaagaggtcttccctctggccatgaattacctggaccgtttcttggctggggtcccgactccgaagtcccatctgcaactcctgggtgctgtctgcatgttcctggcctccaaactcaaagagaccagcccgctgaccgcggagaagctgtgcatttacaccgacaactccatcaagcctcaggagctgctggagtgggaactggtggtgctggggaagttgaagtggaacctggcagctgtcactcctcatgacttcattgagcacatcttgcgcaagctgccccagcagcgggagaagctgtctctgatccgcaagcatgctcagaccttcattgctctgtgtgccaccgactttaagtttgccatgtacccaccgtcgatgatcgcaactggaagtgtgggagcagccatctgtgggctccagcaggatgaggaagtgagctcgctcacttgtgatgccctgactgagctgctggctaagatcaccaacacagacgtggattgtctcaaagcttgccaggagcagattgaggcggtgctcctcaatagcctgcagcagtaccgtcaggaccaacgtgacggatccaagtcggaggatgaactggaccaagccagcacccctacagacgtgcgggatatcgacctgtgaggatgccagttgggccgaaagagagagacgcgtccataatctggtctcttcttctttctggttgtttttgttctttgtgttttagggtgaaacttaaaaaaaaaattctgcccccacctagatcatatttaaagatcttttagaagtgagagaaaaaggtcctacgaaaacggaataataaaaagcatttggtgcctatttgaagtacagcataagggaatcccttgtatatgcgaacagttattgtttgattatgtaaaagtaatagtaaaatgcttacaggaaaacctgcagagtagttagagaatatgtatgcctgcaatatgggaacaaattagaggagacttttttttttcatgttatgagctagcacatacacccccttgtagtataatttcaaggaactgtgtacgccatttatggcatgattagattgcaaagcaatgaactcaagaaggaattgaaataaggagggacatgatggggaaggagtacaaaacaatctctcaacatgattgaaccatttgggatggagaagcacctttgctctcagccacctgttactaagtcaggagtgtagttggatctctacattaatgtcctcttgctgtctacagtagctgctacctaaaaaaagatgttttattttgccagttggacacaggtgattggctcctgggtttcatgttctgtgacatcctgcttcttcttccaaatgcagttcattgcagacaccaccatattgctatctaatggggaaatgtagctatgggccataaccaaaactcacatgaaacggaggcagatggagaccaagggtgggatccagaatggagtcttttctgttattgtatttaaaagggtaatgtggccttggcatttcttcttagaaaaaaactaatttttggtgctgattggcatgtctggttcacagtttagcattgttataaaccattccattcgaaaagcactttgaaaaattgttcccgagcgatagatgggatggtttatgcaagtcatgctgaatactcctcccctcttctcttttgccccctcccttcctgcccccagtctgggttactcttcgcttctggtatctggcgttctttggtacacagttctggtgttcctaccaggactcaagagacaccccttcctgctgacattcccatcacaacattcctcagacaagcctgtaaactaaaatctgttaccattctgatggcacagaaggatcttaattcccatctctatacttctcctttggacatggaaagaaaagttattgctggtgcaaagatagatggctgaacatcagggtgtggcattttgttcccttttccgttttttttttttttattgttgttgttaattttattgcaaagttgtattcagcgtacttgaatttttcttcctctccacttcttagaggcattcagttagcaaagaggttggagcaacaacttttttttttttttttgcacaattgtaattgacaggtaatgaagctatttgttaaaatatttgcctttttaagtaaaaaagaaaaatcagaacagggctatttgaagaattattttatacacagattctgccttgtttcatagtatgagggttgaagacggaaaacaatctaagggtctctcatttttttaattttgttttgttcagtttggtttttttttttttttgcgctgctaagaagctaaagtcatccatccttattcacgttgacagtacctagctgtaatgtttcacagagtgtgctgctattttataaacatttttataatatattattttactgcttaaattccaagtcctgaagtagatggttgagatatgagttcttcgtactggaaaagcccttccgtagtttgttttcttctggtagcatattcatggttgtttttttttttcttttttggttttttggttttttttttttcctctgatcacattcttcaaagacggagtattctttacctcaggtttactggacaaaatcaataactacaaaaggcaatgattcacgcttttgttttcataatacctcacaaccgtacagtttctgcttgggagcccattcgcatgaggaatacagaagcagtgtgagcagggctgactccctctcaggtggaaggcagggcggtctcactcccagggacctttttggtcatggaggccatcgggctcccagttagaccctggtatcctcatcatgatggaaaaaatacattgaaccaagggatcctccctccccttcaaggcagacgttcagtacaaacatttatgcggtaggctcagatgtcgtaatttgcacttaggtaccaggtgtcaggaaacagactaaaaagaattccaccaggctgtttggagatcctcatcttggagctttttcaaaagcggggcttcatctgcaaagggccctttcatcttgaagtttttcccctccgtctttcccctcccctggcatggacaccttgtgtttaggatcatctctgcaggtttcctaggtctgaatctgcgagtagatgaacctgcagcaagcagcgtttatggtgcttccttctccctcctctgtctcaaactgcgcaggcaagcactatgcaagcccaggccctctgctgagcggtactaaacggtcgggttttcaatcacactgaattggcaggataagaaaaataggtcagataagtatgggatgatagttgaagggaggtgaagaggctgcttctctacagaggtgaaattccagatgagtcagtctcttgggaagtgtgtttagaagggttcaggactttgtgagttagcatgaccctaaaattctaggggatttctggtgggacaatgggtggtgaattttgaagttttggagagggaagtggagcagccagcaagtaagctagccagagttttctcaagagccagctttgctcagcacactctcctgggccccaaggagtcccacggaatggggaaagtgggaaccctggagttcttgggaatcttggagcctaaagagaaaccgaggtgcaaattcatttcatggtgactgacccttgagcttaaacagaagcagcaaatgaaagaaccggacaaataaggaagggcacaagcctacccgactctatttacagtctgtaactttccactcttcctgtagtcccgaggcccctgggtccttctagcttttctctttcccatccttggggccttgtgtgatgatgggtgtggggctgccgatgggaaagtcgggggttgttaggcttttctgcctgctcctgcttaaacacaagaaggaatcctggattttgccctctccttagctcttagtctctttggtaggagttttgttccagaggagctctcccccttggatttgaacttgctctttttgttgttgttgttctttctcttctttttcttacctcccactaaaggggttccaaattatcctggtctttttctaccttgttgtgtttctatctcgtctttacttccatctgtttgtttttttctccatcagtgggggccgagttgttcccccagcctgccaaattttgatccttcccctcttttggccaaatcctagggggaagaaatcctagtatgccaaaaatatatgctaagcataattaaactccatgcgggtccataacagccaagaagcctgcaggagaaagccaagggcagttccctccgcagaacaccccatgcgtgctgagaggcgagctccttgaagaaggggctgttcttccaggaggccttattttgaactgcctcaggaccccactggagagcacagcatgccttactactgggtcatccttggtctatgtgctctgtactggaggctctgttctgcctcttatcagccaggtcaggggcacacatggcttaagtgacaaagccagaggagaagacaaccctgacagcatcacgctgcatcccattgctagcaggattggcaactcttcagacggagctgcgcttccctgcagtctagcacctctagggcctctccagactgtgccctgggagctctgggactgaaaggttaagaacataaggcaggatcagatgactctctccaagagggcaggggaattttctctccatgggccacaggggacagggctgggagaagaaatagacttgcaccttatgtcatgtaaataattgattttctagttcaagaagataatattggtagtgtgggaattggaggtaggaaggggaggaagtctgagtaagccagttggcttctaagccaaaaggattcctctttgtttatctctgagacagtccaaccttgagaatagctttaaaagggaaattaatgctgagatgataaagtccccttaagccaacaaaccctctgtagctatagaatgagtgcaggtttctattggtgtggactcagagcaatttacaagagctgttcatgcagccatccatttgtgcaaaatagggtaagaagattcaagaggatatttattacttcctcataccacatggcttttgatgattctggattctaaacaacccagaatggtcatttcaggcacaacgatactacattcgtgtgtgtctgcttttaaacttggctgggctatcagaccctattctcggctcaggttttgagaagccatcagcaaatgtgtacgtgcatgctgtagctgcagcctgcatcccttcgcctgcagcctactttggggaaataaagtgccttactgactgtagccattacagtatccaatgtcttttgacaggtgcctgtccttgaaaaacaaagtttctatttttatttttaattggtttagttcttaactgctggccaactcttacatccccagcaaatcatcgggccattggattttttccattatgttcatcacccttatatcatgtacctcagatctctctctctctcctctctctcagttatatagtttcttgtcttggactttttttttcttttctttttctttttttttttgctttaaaacaagtgtgatgccatatcaagtccatgttattctctcacagtgtactctataagaggtgtgggtgtctgtttggtcaggatgttagaaagtgctgataagtagcatgatcagtgtatgcgaaaaggtttttaggaagtatggcaaaaatgttgtattggctatgatggtgacatgatatagtcagctgccttttaagaggtcttatctgttcagtgttaagtgatttaaaaaaataataacctgttttctgactagtttaaagatggatttgaaaatggttttgaatgcaattaggttatgctatttggacaataaactcaccttgacct

SEQ ID NO: 53 - protein, 289 aa, Homo sapien
MELLCHEVDPVRRAVRDRNLLRDDRVLQNLLTIEERYLPQCSYFKCVQKDIQPYMRRMVATWMLEVCEEQKCEEEVFPLAMNYLDRFLAGVPTPKSHLQLLGAVCMFLASKLKETSPLTAEKLCIYTDNSIKPQELLEWELVVLGKLKWNLAAVTPHDFIEHILRKLPQQREKLSLIRKHAQTFIALCATDFKFAMYPPSMIATGSVGAAICGLQQDEEVSSLTCDALTELLAKITNTDVDCLKACQEQIEAVLLNSLQQYRQDQRDGSKSEDELDQASTPTDVRDIDL

SEQ ID NO: 54 - DNA, 6480 bp, Homo sapien; identical to SEQ ID NO: 52

SEQ ID NO: 55 - protein, 289 aa, Homo sapien; identical to SEQ ID NO: 53

SEQ ID NO: 56 - DNA, 6478 bp, Homo sapien
agagcgagcaggggagagcgagaccagttttaaggggaggaccggtgcgagtaaggcagccccgaggctctgctcgcccaccacccaatcctcgcctcccttctgctccaccttctctctctgccctcacctctcccccgaaaaccccctatttagccaaaggaaggaggtcaggggaacgctctcccctccccttccaaaaaacaaaaacagaaaaacccttttccaggccggggaaagcaggagggagaggggccgccgggctggccatggagctgctgtgccacgaggtggacccggtccgcagggccgtgcgggaccgcaacctgctccgagacgaccgcgtcctgcagaacctgctcaccatcgaggagcgctaccttccgcagtgctcctacttcaagtgcgtgcagaaggacatccaaccctacatgcgcagaatggtggccacctggatgctggaggtctgtgaggaacagaagtgcgaagaagaggtcttccctctggccatgaattacctggaccgtttcttggctggggtcccgactccgaagtcccatctgcaactcctgggtgctgtctgcatgttcctggcctccaaactcaaagagaccagcccgctgaccgcggagaagctgtgcatttacaccgacaactccatcaagcctcaggagctgctggagtgggaactggtggtgctggggaagttgaagtggaacctggcagctgtcactcctcatgacttcattgagcacatcttgcgcaagctgccccagcagcgggagaagctgtctctgatccgcaagcatgctcagaccttcattgctctgtgtgccaccgactttaagtttgccatgtacccaccgtcgatgatcgcaactggaagtgtgggagcagccatctgtgggctccagcaggatgaggaagtgagctcgctcacttgtgatgccctgactgagctgctggctaagatcaccaacacagacgtggattgtctcaaagcttgccaggagcagattgaggcggtgctcctcaatagcctgcagcagtaccgtcaggaccaacgtgacggatccaagtcggaggatgaactggaccaagccagcacccctacagacgtgcgggatatcgacctgtgaggatgccagttgggccgaaagagagagacgcgtccataatctggtctcttcttctttctggttgtttttgttctttgtgttttagggtgaaacttaaaaaaaaaattctgcccccacctagatcatatttaaagatcttttagaagtgagagaaaaaggtcctacgaaaacggaataataaaaagcatttggtgcctatttgaagtacagcataagggaatcccttgtatatgcgaacagttattgtttgattatgtaaaagtaatagtaaaatgcttacaggaaaacctgcagagtagttagagaatatgtatgcctgcaatatgggaacaaattagaggagactttttttttcatgttatgagctagcacatacacccccttgtagtataatttcaaggaactgtgtacgccatttatggcatgattagattgcaaagcaatgaactcaagaaggaattgaaataaggagggacatgatggggaaggagtacaaaacaatctctcaacatgattgaaccatttgggatggagaagcacctttgctctcagccacctgttactaagtcaggagtgtagttggatctctacattaatgtcctcttgctgtctacagtagctgctacctaaaaaaagatgttttattttgccagttggacacaggtgattggctcctgggtttcatgttctgtgacatcctgcttcttcttccaaatgcagttcattgcagacaccaccatattgctatctaatggggaaatgtagctatgggccataaccaaaactcacatgaaacggaggcagatggagaccaagggtgggatccagaatggagtcttttctgttattgtatttaaaagggtaatgtggccttggcatttcttcttagaaaaaaactaatttttggtgctgattggcatgtctggttcacagtttagcattgttataaaccattccattcgaaaagcactttgaaaaattgttcccgagcgatagatgggatggtttatgcaagtcatgctgaatactcctcccctcttctcttttgccccctcccttcctgcccccagtctgggttactcttcgcttctggtatctggcgttctttggtacacagttctggtgttcctaccaggactcaagagacaccccttcctgctgacattcccatcacaacattcctcagacaagcctgtaaactaaaatctgttaccatctgatggcacagaaggatcttaattcccatctctatacttctcctttggacatggaaagaaaagttattgctggtgcaaagatagatggctgaacatcagggtgtggcattttgttcccttttccgttttttttttttttattgttgttgttaattttattgcaaagttgtattcagcgtacttgaatttttcttcctctccacttcttagaggcattcagttagcaaagaggttggagcaacaactttttttttttttttttgcacaattgtaattgacaggtaatgaagctatttgttaaaatatttgcctttttaagtaaaaaagaaaaatcagaacagggctatttgaagaattattttatacacagattctgccttgtttcatagtatgagggttgaagacggaaaacaatctaagggtctctcatttttttaattttgttttgttcagtttggtttttttttttttttgcgctgctaagaagctaaagtcatccatccttattcacgttgacagtacctagctgtaatgtttcacagagtgtgctgctattttataaacatttttataatatattattttactgcttaaattccaagtcctgaagtagatggttgagatatgagttcttcgtactggaaaagcccttccgtagtttgttttcttctggtagcatattcatggttgtttttttttttcttttttggttttttggttttttttttttcctctgatcacattcttcaaagacggagtattcttacctcaggtttactggacaaaatcaataactacaaaaggcaatgattcacgcttttgttttcataatacctcacaaccgtacagtttctgcttgggagcccattcgcatgaggaatacagaagcagtgtgagcagggctgactccctctcaggtggaaggcagggcggtctcactcccagggacctttttggtcatggaggccatcgggctcccagttagaccctggtatcctcatcatgatggaaaaaatacattgaaccaagggatcctccctccccttcaaggcagacgttcagtacaaacatttatgcggtaggctcagatgtcgtaatttgcacttaggtaccaggtgtcaggaaacagactaaaaagaattccaccaggctgtttggagatcctcatcttggagctttttcaaaagcggggcttcatctgcaaagggccctttcatcttgaagtttttcccctccgtctttcccctcccctggcatggacaccttgtgtttaggatcatctctgcaggtttcctaggtctgaatctgcgagtagatgaacctgcagcaagcagcgtttatggtgcttccttctccctcctctgtctcaaactgcgcaggcaagcactatgcaagcccaggccctctgctgagcggtactaaacggtcgggttttcaatcacactgaattggcaggataagaaaaataggtcagataagtatgggatgatagttgaagggaggtgaagaggctgcttctctacagaggtgaaattccagatgagtcagtctcttgggaagtgtgtttagaagggttcaggactttgtgagttagcatgaccctaaaattctaggggatttctggtgggacaatgggtggtgaattttgaagttttggagagggaagtggagcagccagcaagtaagctagccagagttttctcaagagccagctttgctcagcacactctcctgggccccaaggagtcccacggaatggggaaagtgggaaccctggagttcttgggaatcttggagcctaaagagaaaccgaggtgcaaattcatttcatggtgactgacccttgagcttaaacagaagcagcaaatgaaagaaccggacaaataaggaagggcacaagcctacccgactctatttacagtctgtaactttccactcttcctgtagtcccgaggcccctgggtccttctagcttttctctttcccatccttggggccttgtgtgatgatgggtgtggggctgccgatgggaaagtcgggggttgttaggcttttctgcctgctcctgcttaaacacaagaaggaatcctggattttgccctctccttagctcttagtctctttggtaggagttttgttccagaggagctctcccccttggatttgaacttgctctttttgttgttgttgttctttctcttctttttcttacctcccactaaaggggttccaaattatcctggtctttttctaccttgttgtgtttctatctcgtctttacttccatctgtttgtttttttctccatcagtgggggccgagttgttcccccagcctgccaaattttgatccttcccctcttttggccaaatcctagggggaagaaatcctagtatgccaaaaatatatgctaagcataattaaactccatgcgggtccataacagccaagaagcctgcaggagaaagccaagggcagttccctccgcagaacaccccatgcgtgctgagaggcgagctccttgaagaaggggctgttcttccaggaggccttattttgaactgcctcaggaccccactggagagcacagcatgccttactactgggtcatccttggtctatgtgctctgtactggaggctctgttctgcctcttatcagccaggtcaggggcacacatggcttaagtgacaaagccagaggagaagacaaccctgacagcatcacgctgcatcccattgctagcaggattggcaactcttcagacggagctgcgcttccctgcagtctagcacctctagggcctctccagactgtgccctgggagctctgggactgaaaggttaagaacataaggcaggatcagatgactctctccaagagggcaggggaattttctctccatgggccacaggggacagggctgggagaagaaatagacttgcaccttatgtcatgtaaataattgattttctagttcaagaagataatattggtagtgtgggaattggaggtaggaaggggaggaagtctgagtaagccagttggcttctaagccaaaaggattcctctttgtttatctctgagacagtccaaccttgagaatagctttaaaagggaaattaatgctgagatgataaagtccccttaagccaacaaaccctctgtagctatagaatgagtgcaggtttctattggtgtggactcagagcaatttacaagagctgttcatgcagccatccatttgtgcaaaatagggtaagaagattcaagaggatatttattacttcctcataccacatggcttttgatgattctggattctaaacaacccagaatggtcatttcaggcacaacgatactacattcgtgtgtgtctgcttttaaacttggctgggctatcagaccctattctcggctcaggttttgagaagccatcagcaaatgtgtacgtgcatgctgtagctgcagcctgcatcccttcgcctgcagcctactttggggaaataaagtgccttactgactgtagccattacagtatccaatgtcttttgacaggtgcctgtccttgaaaaacaaagtttctatttttatttttaattggtttagttcttaactgctggccaactcttacatccccagcaaatcatcgggccattggattttttccattatgttcatcacccttatatcatgtacctcagatctctctctctctcctctctctcagttatatagtttcttgtcttggactttttttttcttttctttttctttttttttttgctttaaaacaagtgtgatgccatatcaagtccatgttattctctcacagtgtactctataagaggtgtgggtgtctgtttggtcaggatgttagaaagtgctgataagtagcatgatcagtgtatgcgaaaaggtttttaggaagtatggcaaaaatgttgtattggctatgatggtgacatgatatagtcagctgccttttaagaggtcttatctgttcagtgttaagtgatttaaaaaaataataacctgttttctgactagtttaaagatggatttgaaaatggttttgaatgcaattaggttatgctatttggacaataaactcaccttgacct

SEQ ID NO: 57 - protein, 289 aa, Homo sapien; identical to SEQ ID NO: 53

SEQ ID NO: 58 - DNA, 6755 bp, Homo sapien
gagagaagcctgatatgtaacccaggcgggtgggagcctcagtctgtcgggctgaggtctggcatctacaaagcctcttggccgtgttctgaacttgaagcctggaggagttctctgctcagcacagccaaggaacagaattagaagaaaaggaaccctggcctgaggcaggtgacaaacattaccaccccagctgtgcacgatgcagcagatgcaaccagatgttcacagaaggagaggaaatgtatcttcaaggctccaccgtttggcatcccgactgtaagcaatctacgaagaccgaggaaaagctgcggcctaccaggacatcctcggaaagtatttattctaggccaggctccagtattcctggctcaccaggtcatactatctatgcaaaagtagacaatgagatcctggattacaaggatttagcagccattccgaaggtcaaggcaatttatgacattgaacgtccagatcttattacctatgagcctttctacacttcgggctatgatgacaaacaggagagacagagccttggagagtctccgaggactttgtctcctactccatcagcagaagggtaccaggatgttcgggatcggatgatccatcggtccacgagccagggctccatcaactcccctgtgtacagccgccacagctacactccaaccacgtcccgctctccccagcatttccacagacctggcaatgagccgtccagcggccggaactcccctctcccttaccggccagacagccgccctctaactccaacttacgctcaggcccctaaacatttccatgttccagatcaaggaatcaacatttaccgaaagccacccatctacaaacagcatgctgccttggcagcccagagcaagtcctcagaagatatcatcaagttttccaagttcccagcagcccaggcaccagaccccagcgagacaccagagattgagacggaccactggcctggtcccccctcatttgctgtcataggacctgacatgaaacgcagatctagtggcagagaggaagatgatgaggaacttctgagacgtcggcagcttcaagaagagcaattaatgaagcttaactcaggcctgggacagttgatcttgaaagaagagatggagaaagagagccgggaaaggtcatctctgttagccagtcgctacgattctcccatcaactcagcttcacatattccatcatctaaaactgcatctctccctggctatggaagaaatgggcttcaccggcctgtttctaccgacttcgctcagtataacagctatggggatgtcagcgggggagtgcgagattaccagacactcccagatggccacatgcctgcaatgagaatggaccgaggagtgtctatgcccaacatgttggaaccaaagatatttccatatgaaatgctcatggtgaccaacagagggcgaaacaaaatcctcagagaggtggacagaaccaggctggagcgccacttagcccctgaagtgtttcgggaaatctttggaatgtccatacaggagtttgacaggttacctctttggagacgcaacgacatgaagaaaaaagcaaaactcttctaagtcccactcgtgaatggcaattagagaaaggactgacagtggcggtgccccataggatgtcatattgaggcccaaacttgattggagaatttgcaaactaccgtcgctcagcaacaccaaaaagagaaagtctggttaaaacaccatgagtcaaatgtcgggccagccaacagtaacacttgccaagaagcatggcgtagaaatttctatgttccgaaacacagagtagtgtccacatgtgaccttttcacattaccttatgtatacaacaggagctgcgttgttttcttctttttcttttcctttatctgttgtccaacaacagtgctgactgtccggataagagctggcaagtgcccttaggatgccgcatgggaaaaatcggttatcataatttcaaagtataaatatatttattatgtagcgctgcggctaagaaggaagagtgaggggtctgtccatggggtggcagtgatttcacacccgcctttcttgaatggcttcgtgttactcagccgtgccctggcaggaatggaactccatcagggaacagggcagctctgtttgaatggggtgaaaaacagcaaaattaattcttagcaagctccttgttctctactgttcaccgggacctggctggcaaatgacttagctattagtatatttaaaaactgttcaaaagcaaaagagaaggaacaggaatgaaaggaaaccttcccttaactctttctgcttcccatagcaggtctggttcctgctccccgcctaggacaggagctgtctggagctccacctttgcaaagaaaggaaaaacacaaattgcccccagattggcccagtggcatgccattaggtgattttgcgtaggggccatatcattcatggccaaaaaaaaccaaaaagcaaaaaacaaaaacaagtcccatgtcctactgactctagttcttccagtcgttatcctctgctgtctctctggcatcctatgaatcagatcaagcccatgctgttgttggtttttaaggtttctttcaataataggctaaggaaagacatgtttttctcttttaaatctctgcaactccaaagtagactccttcgaacgtatttaatttggccttttcagctttcttcttgcccagctctgtcgaattcatgggtgtgtgtgcacatgttggtttcactcacccagagtaattttgtgagcatgcatgtgctttttaatttctgcttgaatgtttgtcctgctgtgttgcagcttctaaagacattgtcaccgagtgtgtgtgactcaaagatcaagagtgaggctaaactgcgaccccaacatcacttccttcatggaaaggtgttggcgctgatgtagctcatggaaggatcagactgggaaccacagaggaaggatgaggtgggatgtggaggtcagagcatctcacgagagtccctcaggctctgcaacactagattcgaatatgagcctagggtttccccaacacgtgcgtgcatatgaaaccacatcatgattcccgacgtgagttagatgagggagagtttgtgtaactccacacccaggagggtaagccactttattatcatgctttggggctgtgcttaagaatttaagctctgttttaaagccgaagaagaaaacatttgaatttaccttcatatgccactaagaacaaaagctctgaagttcttcctgctggcaccaaatattaggattacaagctgtctctctgacaccagtggtaaaaaagcaagtagaatagtttctgagtctgtgttgcagcctctgacacgtggctcactgctgtcatttggggggtggaatgaacagtcactgttctatagcatcctcctgtgctcttacctaaggaatctaaattgtcctagccttccattgctatgcactgaatgaggactactctcgtgtgtgtgtgtgtgtgtgtgtgtgtgtgtgtgtgtgtgtgtgtgtgttggatctactaacatgtttagcaaatggctctgacagggtggccatgagcagatgagaccagctcttgcttggttggaagccacactgcagtttgcagtttagcctttggtgtctcagtggcctcttgcttattccatgctttttctatcccatcctctctctgtgccctcctgcaatggcagccttggcacaatgcctgggtgtcctcatccttgctttactctggaaagtgtggggatggagaggatggtgcatttccagtgcttccttacctgtcaataacaatggtggccacctgggtcccagcacttggctggtggagagatttttttcattatggagctaataaagggtccctacgttttacattgattaatgaattatcacccagacatgtgcagatgaaatgtcaatataagaaaaatcaaggtatttgggaaacatgggcataatcaggtagttttgctaaaattcctcttccttggtctacataaagaagacatgggtctgtcatagaatggggacattagactgaaaactgggacaacccccttccttattttatagagactaggagttaaggggcctgcctaagattgcagtgataaagaactgaaccctaaatcagctcccactaatgaaaccctgctttccttgtatcttttaaactcagttctgcatccaacttgagaagaaaaaaagcttctttccatatcaagtaccatatgagttcatttaaactgcaccttgcagaaatgcattgccagaaagcaccagtagcctcctatctgcaagcagagtagtgctctgctctggggaggggtcattggaaaccataatgcagagtgggccccctactccatttcccagcaaaaggctccagctggagggatgggttgtggggcaacctggttcctgctaactgccagattgaatgtgtgggctagaatgcctgcgcatttagttaaactgggctcagcatgcttgtcctcaaaatgtccatcctggtcacagcacacaagatggctattggtctgcttttaccctaccctgtactatacatgaaaattccagttattaacacactcaaactggtggagcttgttcaccctaggaaggggattgtatatatggcaggcttccctggtgccgatgtaaagggctacatttgggaacatttgacttccttgggactcttaagtgcatactgatggcatgaagtaaaaggggcctcaatgatgataggaaaatcagttcttttaaaatttcttcaagaaaatccaggctatcacatagtctttctgtgtgacttattaggagataggaagagcattgggaaacttgcacagctagctatgcatctacattttggtttggggttagttatgaaatgttcttaatatgacgtgttcaataacttcacataaacttcctgttctccaaaacctcaaagagatagagttaatgagttgttgtttttttttaaatgggggtagttttctatctgtcatgggctctagcatctactccgctacccaattctgtcatctccaagctgagtttcctcttctgaggcagaggctggagcagttctttttcagttctcatcctctccatcccaatccagtatatcaatcaactctaactcggagacgtctagctggcaatgtttctaaaactttcactggatttctttagacattgaagcaaacatttttttctaagaattgcttctcagatgatgatatcaaatgtatatgcttttgcaagtttgaaaagttcaaattaaccacttttgactaggtaagtctttctaaaaaccatttaaagctaactgggtcttagcatcctcctgtgtatggaagagacaggtgaccgctccaggttgggtgctcacagaacccttttcctgactctcatggaagatggtggaaggaaaatagactgtctcatcaaccctcctgtgtcctctgaagcaatctcagtttttattaaccacctcttctgtgtttctggtagctatttaacctgtatttaatctgtacttcctatgccagcctcaattttatttgatttttaaaattattctcttctaaccaatgaagtgtttgtcagtatgccccaaagcttgctcttttgtgctcccttttgaataactttctatccagaaaaagagattatttgggacttgagatttgcagtgataccaacttatagcaatgatgtactttaagggaactacccaactatgttgtgatagaagaaagagaaaccttcactttggcattttttttaatcactgtttatttttctgtttgcggcccaggaagcagtgggaggtggtggcagatatgctttgcatatggattgttatgtttttatttgggcaagtttaatcatggaaaactcaaaaagaaggggggaaatggtcagtttaagccaaaagaaactttctaaacaatgtataggtacacagcaaaattaaacaaatccaacaatttctgaagcttagtgtaattgagtggtggttgttattcaataaaattattcccaaaagtgtttctcctaagagtgcagttcccatgagtcacttcctgaacccattgaccaaaggtggacagagacaatcctgtagaccttgacattcagaaagatgtgagctgcttactgatcatatatgcatacgtttctttacagcagaggaaaccattgtccacaaaactgatgttcttttggggttttatgtacagacttgtccaatcatgtgtgtggttcctgcgagttgctgatgactccgcattgaagctctctgagttctttgattttaagttgggtttatggaattttttcaaatgttggaaggcgtgtggttcttcctgccctccctccccttttggaaatatgaaagcaaatgtttagaagaattccttttgaaaagctgtgtcgtgttccctgtgaaactgagcaggtgtgtgttggcgcgctaagtgccacatgcttgtgtgtagaggaggaggtggccctgccggctccgcgctgctgtgcctgtgatccctacctgctccccgctcctgttgccagcagcactcactgcactcctttgtcatatactctgcatcactgtcatactcacaacttcgtgaataaagttgtgtgctttattcgtc

SEQ ID NO: 59 - protein, 462 aa, Homo sapien
MFTEGEEMYLQGSTVWHPDCKQSTKTEEKLRPTRTSSESIYSRPGSSIPGSPGHTIYAKVDNEILDYKDLAAIPKVKAIYDIERPDLITYEPFYTSGYDDKQERQSLGESPRTLSPTPSAEGYQDVRDRMIHRSTSQGSINSPVYSRHSYTPTTSRSPQHFHRPGNEPSSGRNSPLPYRPDSRPLTPTYAQAPKHFHVPDQGINIYRKPPIYKQHAALAAQSKSSEDIIKFSKFPAAQAPDPSETPEIETDHWPGPPSFAVIGPDMKRRSSGREEDDEELLRRRQLQEEQLMKLNSGLGQLILKEEMEKESRERSSLLASRYDSPINSASHIPSSKTASLPGYGRNGLHRPVSTDFAQYNSYGDVSGGVRDYQTLPDGHMPAMRMDRGVSMPNMLEPKIFPYEMLMVTNRGRNKILREVDRTRLERHLAPEVFREIFGMSIQEFDRLPLWRRNDMKKKAKLF

SEQ ID NO: 60 - DNA, 3322 bp, Homo sapien
gaaagctgtatttgctgcacgtggaaatctccgttattttccagcacccaacagtagcgtaatgggagtaacggacttaacctcatttctctttcagagcatttagccttcatatgcccttccctgcatgcttcccccaggccgtcaagacttgagttctgcctcgcttcccggcgcggtcgcagccctcagcccacttaggataatggcgacagctgaggtactgaacattggtaaaaaattatatgagggtaaaacaaaagaagtctacgaattgttagacagtccaggaaaagtcctcctgcagtccaaggaccagattacagcaggaaatgcagctagaaaaaaccacctggaaggaaaagctgcaatctcaaataaaatcaccagttgtatttttcagttattacaggaagcaggtattaaaactgccttcaccagaaaatgtggggagacagctttcattgcaccgcagtgtgaaatgattccaattgaatgggtttgcagaagaatagcaactggttcttttctcaaaagaaatcctggtgtcaaggaaggatataagttttacccacctaaagtggagttgtttttcaaggatgatgccaataatgacccacagtggtctgaggaacagctgattgctgcaaaattttgctttgctggacttcttataggccagactgaagtggatatcatgagtcatgctacacaggctatatttgaaatactggagaaatcctggttgccccagaattgtacactggttgatatgaagattgaatttggtgttgatgtaaccaccaaagaaattgttcttgctgatgttattgacaatgattcctggagactctggccatcaggagatcgaagccaacagaaagacaaacagtcttatcgggacctcaaagaagtaactcctgaagggctccaaatggtaaagaaaaactttgagtgggttgcagagagagtagagttgcttttgaaatcagaaagtcagtgcagggttgtagtgttgatgggctctacttctgatcttggtcactgtgaaaaaatcaagaaggcctgtggaaattttggcattccatgtgaacttcgagtaacatctgcgcataaaggaccagatgaaactctgaggattaaagctgagtatgaaggggatggcattcctactgtatttgtggcagtggcaggcagaagtaatggtttgggaccagtgatgtctgggaacactgcatatccagttatcagctgtcctcccctcacaccagactggggagttcaggatgtgtggtcttctcttcgactacccagtggtcttggctgttcaaccgtactttctccagaaggatcagctcaatttgctgctcagatatttgggttaagcaaccatttggtatggagcaaactgcgagcaagcattttgaacacatggatttccttgaagcaggctgacaagaaaatcagagaatgtaatttataagaaagaatgccattgaattttttaggggaaaaactacaaatttctaatttagctgaaggaaaatcaagcaagatgaaaaggtaattttaaattagagaacacaaataaaatgtattagtgaataaatgcttctctagatccatattaataaacatgagcatctaacccctcctttcttaggctagacaccaagatatttcagccagcctttatcattcctcttactttatcctttttccttaagtattggtggtcactactattgagtttcttccttaacactgattaaatgatcttaactccctcagctaaaactggcattactgactcccagctatatttctccagacttgcatttttttttttttttttgagacagggtctcactgtcgcccaggctggagtgcagtggcgtgatctcagttcactgctgctttccctcctgggctcaagcagttctcccacctcagcctctcgactaacagggactataatcttgcagcaccatgccgagctaattttattttttgtagagatgagctctcactatgtcacccaggttcgtctcaaactcctgaaccctagtaattctcctatctcagcctcccaaagtgctagggttacagacatgagccactgtgcctgtctagacttgtactttcaactgtccatttctccctgtctgtcccatgggcactcatgaaaaaacagaatgctcccaactttattcatcttccaagcctgtagctcttggtatactcactgttgcaagtcagaagcttgatttcatcattgatgtttttctcacgtttcacatctcactcatcaccaagtcatgttggtgttaatttctgattaacccttgaatttaccgtcttctcatcctctgtacaaaagcctcaagtgagggtcaaattcaacattatcctgatctagacagcccccattctcaatccacccttttccaagttgattgcccaaggacttctaacaataaactctcttttgcaccacagacttctttgaaaatatacatgctgttgaccctctctgtagaaaaccgcacacataaaacttaccaacagatttcattggttcttgggttctcccgaagcctatccatggtttatagattaagaattgatgaggtagctgggcacagtggctcacacctacgatcacagcacttcgggaggctgaagcaagcagatcacttgaggtcaggagtttgagaccagcctggccaacatggtgaaaccctgtctctactaaaaatacaaaaagtagccagccgtgatgacaggcacctgtaatcccagctactcgggaggctgaggcatgagaattgcttgaacccgggaggcggaggttgcagtgagcctggatcatgccactgcactccaacctgggcagcagagcaagactctgtctcaaaaggggaaaaaaaaaattgctgatgtgacccatgaagggaactcattttcctcgtaattttggactgccacacattggtacctttagttctctgaaggcccacgtttttatcattaagacctatttgttagctagtagagctttatgttcgctgtccatgaaaccttctgtaaccacagtgactacaagtagttctttctctattgaattattaggtccagaatagaagatgtcattgtacactttatttccctcacactgtgttatgctctgatgtgctatgcttagctatctgtcagagattagtaaattataaaactcatgtgtactacttaagtttatatcttatgctagtttataagaacaattaaaaggacttagaagattaaaaaaaaaaaaaaaaaa

SEQ ID NO: 61 - protein, 425 aa, Homo sapien
MATAEVLNIGKKLYEGKTKEVYELLDSPGKVLLQSKDQITAGNAARKNHLEGKAAISNKITSCIFQLLQEAGIKTAFTRKCGETAFIAPQCEMIPIEWVCRRIATGSFLKRNPGVKEGYKFYPPKVELFFKDDANNDPQWSEEQLIAAKFCFAGLLIGQTEVDIMSHATQAIFEILEKSWLPQNCTLVDMKIEFGVDVTTKEIVLADVIDNDSWRLWPSGDRSQQKDKQSYRDLKEVTPEGLQMVKKNFEWVAERVELLLKSESQCRVVVLMGSTSDLGHCEKIKKACGNFGIPCELRVTSAHKGPDETLRIKAEYEGDGIPTVFVAVAGRSNGLGPVMSGNTAYPVISCPPLTPDWGVQDVWSSLRLPSGLGCSTVLSPEGSAQFAAQIFGLSNHLVWSKLRASILNTWISLKQADKKIRECNL

SEQ ID NO: 62 - DNA, 3322 bp, Homo sapien; identical to SEQ ID NO: 60

SEQ ID NO: 63 - protein, 425 aa, Homo sapien; identical to SEQ ID NO: 61

SEQ ID NO: 64 - DNA, 2015 bp, Homo sapien
tcgctgcgaaggacatttgggctgtgtgtgcgacgcgggtcggaggggcagtcgggggaaccgcgaagaagccgaggagcccggagccccgcgtgacgctcctctctcagtccaaaagcggcttttggttcggcgcagagagacccgggggtctagcttttcctcgaaaagcgccgccctgcccttggccccgagaacagacaaagagcaccgcagggccgatcacgctgggggcgctgaggccggccatggtcatggaagtgggcaccctggacgctggaggcctgcgggcgctgctgggggagcgagcggcgcaatgcctgctgctggactgccgctccttcttcgctttcaacgccggccacatcgccggctctgtcaacgtgcgcttcagcaccatcgtgcggcgccgggccaagggcgccatgggcctggagcacatcgtgcccaacgccgagctccgcggccgcctgctggccggcgcctaccacgccgtggtgttgctggacgagcgcagcgccgccctggacggcgccaagcgcgacggcaccctggccctggcggccggcgcgctctgccgcgaggcgcgcgccgcgcaagtcttcttcctcaaaggaggatacgaagcgttttcggcttcctgcccggagctgtgcagcaaacagtcgacccccatggggctcagccttcccctgagtactagcgtccctgacagcgcggaatctgggtgcagttcctgcagtaccccactctacgatcagggtggcccggtggaaatcctgccctttctgtacctgggcagtgcgtatcacgcttcccgcaaggacatgctggatgccttgggcataactgccttgatcaacgtctcagccaattgtcccaaccattttgagggtcactaccagtacaagagcatccctgtggaggacaaccacaaggcagacatcagctcctggttcaacgaggccattgacttcatagactccatcaagaatgctggaggaagggtgtttgtccactgccaggcaggcatttcccggtcagccaccatctgccttgcttaccttatgaggactaatcgagtcaagctggacgaggcctttgagtttgtgaagcagaggcgaagcatcatctctcccaacttcagcttcatgggccagctgctgcagtttgagtcccaggtgctggctccgcactgttcggcagaggctgggagccccgccatggctgtgctcgaccgaggcacctccaccaccaccgtgttcaacttccccgtctccatccctgtccactccacgaacagtgcgctgagctaccttcagagccccattacgacctctcccagctgctgaaaggccacgggaggtgaggctcttcacatcccattgggactccatgctccttgagaggagaaatgcaataactctgggaggggctcgagagggctggtccttatttatttaacttcacccgagttcctctgggtttctaagcagttatggtgatgacttagcgtcaagacatttgctgaactcagcacattcgggaccaatatatagtgggtacatcaagtccatctgacaaaatggggcagaagagaaaggactcagtgtgtgatccggtttctttttgctcgcccctgttttttgtagaatctcttcatgcttgacatacctaccagtattattcccgacgacacatatacatatgagaatataccttatttatttttgtgtaggtgtctgccttcacaaatgtcattgtctactcctagaagaaccaaatacctcaatttttgtttttgagtactgtactatcctgtaaatatatcttaagcaggtttgttttcagcactgatggaaaataccagtgttgggtttttttttagttgccaacagttgtatgtttgctgattatttatgacctgaaataatatatttcttcttctaagaagacattttgttacataaggatgacttttttatacaatggaataaattatggcatttctattg

SEQ ID NO: 65 - protein, 367 aa, Homo sapien
MVMEVGTLDAGGLRALLGERAAQCLLLDCRSFFAFNAGHIAGSVNVRFSTIVRRRAKGAMGLEHIVPNAELRGRLLAGAYHAVVLLDERSAALDGAKRDGTLALAAGALCREARAAQVFFLKGGYEAFSASCPELCSKQSTPMGLSLPLSTSVPDSAESGCSSCSTPLYDQGGPVEILPFLYLGSAYHASRKDMLDALGITALINVSANCPNHFEGHYQYKSIPVEDNHKADISSWFNEAIDFIDSIKNAGGRVFVHCQAGISRSATICLAYLMRTNRVKLDEAFEFVKQRRSIISPNFSFMGQLLQFESQVLAPHCSAEAGSPAMAVLDRGTSTTTVFNFPVSIPVHSTNSALSYLQSPITTSPSC

SEQ ID NO: 66 - DNA, 1596 bp, Homo sapien
tgtcggggacggtaaccgggacccgtgctctgctcctgtcgccttcgcctcctgaatccctagccatatgcgtgagtgcatctccatccacgttggccaggctggtgtccagattggcaatgcctgctgggagctctactgcctggaacacggcatccagcccgatggccagatgccaagtgacaagaccattgggggaggagatgactccttcaacaccttcttcagtgagacgggcgctggcaagcacgtgccccgggctgtgtttgtagacttggaacccacagtcattgatgaagttcgcactggcacctaccgccagctcttccaccctgagcagctcatcacaggcaaggaagatgctgccaataactatgcccgagggcactacaccattggcaaggagatcattgaccttgtgttggaccgaattcgcaagctggctgaccagtgcacccgtcttcagggcttcttggttttccacagctttggtgggggaactggttctgggttcacctccctgctcatggaacgcctgtcagttgattatggcaagaaatccaagctggagttctccatttacccggcaccccaggtttccacagctgtagttgagccctacaactccatcctcaccacccacaccaccctggagcactctgattgtgccttcatggtagacaatgaggccatctatgacatctgtcgtagaaacctcgatatcgagcgcccaacctacactaaccttaaccgccttattagccagattgtgtcctccatcactgcttccctgagatttgatggagccctgaatgttgacctgacagaattccagaccaacctggtcccctacccccgcatccacttccctctggccacatatgcccctgtcatctctgctgagaaagcctaccatgaacagctttctgtagcagacatcaccaatgcttgctttgagccagccaaccagatggtgaaatgtgaccctggccatggtaaatacatggcttgctgcctgttgtaccgtggtgacgtggttcccaaagatgtcaatgctgccattgccaccatcaaaaccaagcgcacgatccagtttgtggattggtgccccactggcttcaaggttggcatcaactaccagcctcccactgtggtgcctggtggagacctggccaaggtacagagagctgtgtgcatgctgagcaacaccacagccattgctgaggcctgggctcgcctggaccacaagtttgacctgatgtatgccaagcgtgcctttgttcactggtacgtgggtgaggggatggaggaaggcgagttttcagaggcccgtgaagatatggctgcccttgagaaggattatgaggaggttggtgtggattctgttgaaggagagggtgaggaagaaggagaggaatactaattatccattccttttggccctgcagcatgtcatgctcccagaatttcagcttcagcttaactgacagatgttaaagctttctggttagattgttttcacttggtgatcatgtcttttccatgtgtacctgtaatatttttccatcatatctcaaagtaaagtcattaacatca

SEQ ID NO: 67 - protein, 451 aa, Homo sapien
MRECISIHVGQAGVQIGNACWELYCLEHGIQPDGQMPSDKTIGGGDDSFNTFFSETGAGKHVPRAVFVDLEPTVIDEVRTGTYRQLFHPEQLITGKEDAANNYARGHYTIGKEIIDLVLDRIRKLADQCTRLQGFLVFHSFGGGTGSGFTSLLMERLSVDYGKKSKLEFSIYPAPQVSTAVVEPYNSILTTHTTLEHSDCAFMVDNEAIYDICRRNLDIERPTYTNLNRLISQIVSSITASLRFDGALNVDLTEFQTNLVPYPRIHFPLATYAPVISAEKAYHEQLSVADITNACFEPANQMVKCDPGHGKYMACCLLYRGDVVPKDVNAAIATIKTKRTIQFVDWCPTGFKVGINYQPPTVVPGGDLAKVQRAVCMLSNTTAIAEAWARLDHKFDLMYAKRAFVHWYVGEGMEEGEFSEAREDMAALEKDYEEVGVDSVEGEGEEEGEEY

SEQ ID NO: 68 - DNA, 526 bp, Homo sapien
atctctctcgggtggagtccttctgacagctggtgcgcctgcccgggaacatcctcctggactcaatcatggcttgtggtctggtcgccagcaacctgaatctcaaacctggagagtgccttcgagtgcgaggcgaggtggctcctgacgctaagagcttcgtgctgaacctgggcaaagacagcaacaacctgtgcctgcacttcaaccctcgcttcaacgcccacggcgacgccaacaccatcgtgtgcaacagcaaggacggcggggcctgggggaccgagcagcgggaggctgtctttcccttccagcctggaagtgttgcagaggtgtgcatcaccttcgaccaggccaacctgaccgtcaagctgccagatggatacgaattcaagttccccaaccgcctcaacctggaggccatcaactacatggcagctgacggtgacttcaagatcaaatgtgtggcctttgactgaaatcagccagcccatggcccccaataaaggcagctgcctctgctcccctg

SEQ ID NO: 69 - protein, 135 aa, Homo sapien
MACGLVASNLNLKPGECLRVRGEVAPDAKSFVLNLGKDSNNLCLHFNPRFNAHGDANTIVCNSKDGGAWGTEQREAVFPFQPGSVAEVCITFDQANLTVKLPDGYEFKFPNRLNLEAINYMAADGDFKIKCVAFD

SEQ ID NO: 70 - DNA, 1418 bp, Homo sapien
  Unsure 1205: Unknown base
tcagaagctgattgcatccaaagcaaatgaccaccaaggtttttatcttctaaacagtataatagagcacatgcctcctgaatcagttgaccaatataggaaacaaatcttcattctgctattccagagacttcagaattccaaaacaaccaagtttatcaagagttttttagtctttattaatttgtattgcataaaatatggggcactagcactacaagaaatatttgatggtatacaaccaaaaatgtttggaatggttttggaaaaaattattattcctgaaattcagaaggtatctggaaatgtagagaaaaagatctgtgcggttggcataaccaaattactaacagaatgtcccccaatgatggacactgagtataccaaactgtggactccattattacagtctttgattggtctttttgagttacccgaagatgataccattcctgatgaggaacattttattgacatagaagatacaccaggatatcagactgccttctcacagttggcatttgctgggaaaaaagagcatgatcctgtaggtcaaatggtgaataaccccaaaattcacctggcacagtcacttcacaagttgtctaccgcctgtccaggaaggacctatttttgaaggcataaaagcagttgagtttctggagaatttttggatggtgattaatgacttgactggctgctcttcccagagctgtggcagctctcccgtagaagatggggtttgtattggcgcaccaagatctccaacagccagtgtgtgtttcccatctcttgtaggttccatcaatggtgagcaccagcctgaatgcagaagcgctccagtatctccaagggtaccttcaggcagccagtgtgacactgctttaaactgcatttttctaatgggctaaacccagatggtttcctaggaaatcacaggcttctgagcacagctgcattaaaacaaaggaagttctccttttgaacttgtcacgaattccatcttgtaaaggatattaaatgttgctttaacctgaaccttgagcaaattagttggtttgtgtgatcatacagttatgtgggtggcttctagtttgcaacttcaagggacaagtattaatagttcagtgtatggcgttggtttgtgttgagcgtttgcacggtttggataatcttaaattttgacggacactgtggagactttnctgttactaaatccttttgttttgaagctgttgctatttgtatttctcttgtcctttatattttttgtctgtttatttacgcttttattggaaatgtgaataagtaaagaattacttgtgttacttgccaagcagtgcacatttcatagtttcaaatctgtaatcagcaataaaaatcctaaaatatgtacctaaaaaaaaaaaaaaaaaaaa

SEQ ID NO: 71 - DNA, 1584 bp, Homo sapien
cgggatgcggcgcgccgcgcgttgaacctccttggcctgggcgaagctgtgtggaccaagcaagtcaggagtgtggccatgttttctgagcaggctgcccagagggcccacactctactgtccccaccatcagccaacaatgccacctttgcccgggtgccagtggcaacctacaccaactcctcacaacccttccggctaggagagcgcagctttagccggcagtatgcccacatttatgccacccgcctcatccaaatgagacccttcctggagaaccgggcccagcagcactggggcagtggagtgggagtgaagaagctgtgtgaactgcagcctgaggagaagtgctgtgtggtgggcactctgttcaaggccatgccgctgcagccctccatcctgcgggaggtcagcgaggagcacaacctgctcccccagcctcctcggagtaaatacatacacccagatgacgagctggtcttggaagatgaactgcagcgtatcaaactaaaaggcaccattgacgtgtcaaagctggttacggggactgtcctggctgtgtttggctccgtgagagacgacgggaagtttctggtggaggactattgctttgctgaccttgctccccagaagcccgcacccccacttgacacagataggtttgtgctactggtgtccggcctgggcctgggtggcggtggaggcgagagcctgctgggcacccagctgctggtggatgtggtgacggggcagcttggggacgaaggggagcagtgcagcgccgcccacgtctcccgggttatcctcgctggcaacctcctcagccacagcacccagagcagggattctatcaataaggccaaatacctcaccaagaaaacccaggcagccagcgtggaggctgttaagatgctggatgagatcctcctgcagctgagcgcctcagtgcccgtggacgtgatgccaggcgagtttgatcccaccaattacacgctcccccagcagcccctccacccctgcatgttcccgctggccactgcctactccacgctccagctggtcaccaacccctaccaggccaccattgatggagtcagatttttggggacatcaggacagaacgtgagtgacattttccgatacagcagcatggaggatcacttggagatcctggagtggaccctgcgggtccgtcacatcagccccacagccccggacactctaggttgttaccccttctacaaaactgacccgttcatcttcccagagtgcccgcatgtctacttttgtggcaacacccccagctttggctccaaaatcatccgaggtcctgaggaccagacagtgctgttggtgactgtccctgacttcagtgccacgcagaccgcctgccttgtgaacctgcgcagcctggcctgccagcccatcagcttctcgggcttcggggcagaggacgatgacctgggaggcctggggctgggcccctgactcaaaaaagtggttttgaccagagaggcccagatggaggctgttcattccctgcagtgtcggcattgtaaataaagcctggcacttgctgatgcg

SEQ ID NO: 72 - protein, 469 aa, Homo sapien
MFSEQAAQRAHTLLSPPSANNATFARVPVATYTNSSQPFRLGERSFSRQYAHIYATRLIQMRPFLENRAQQHWGSGVGVKKLCELQPEEKCCVVGTLFKAMPLQPSILREVSEEHNLLPQPPRSKYIHPDDELVLEDELQRIKLKGTIDVSKLVTGTVLAVFGSVRDDGKFLVEDYCFADLAPQKPAPPLDTDRFVLLVSGLGLGGGGGESLLGTQLLVDVVTGQLGDEGEQCSAAHVSRVILAGNLLSHSTQSRDSINKAKYLTKKTQAASVEAVKMLDEILLQLSASVPVDVMPGEFDPTNYTLPQQPLHPCMFPLATAYSTLQLVTNPYQATIDGVRFLGTSGQNVSDIFRYSSMEDHLEILEWTLRVRHISPTAPDTLGCYPFYKTDPFIFPECPHVYFCGNTPSFGSKIIRGPEDQTVLLVTVPDFSATQTACLVNLRSLACQPISFSGFGAEDDDLGGLGLGP

SEQ ID NO: 73 - DNA, 1299 bp, Homo sapien
ggcacgagggcggcggcggcggtagaggcggcggcggcggcggcagcgggctcggaggcagcggttgggctcgcggcgagcggacggggtcgagtcagtgcgttcgcgcgagttggaatcgaagcctcttaaaatggcagatgacttggacttcgagacaggagatgcaggggcctcagccaccttcccaatgcagtgctcagcattacgtaagaatggctttgtggtgctcaaaggccggccatgtaagatcgtcgagatgtctacttcgaagactggcaagcacggccacgccaaggtccatctggttggtattgacatctttactgggaagaaatatgaagatatctgcccgtcaactcataatatggatgtccccaacatcaaaaggaatgacttccagctgattggcatccaggatgggtacctatcactgctccaggacagcggggaggtacgagaggaccttcgtctccctgagggagaccttggcaaggagattgagcagaagtacgactgtggagaagagatcctgatcacggtgctgtctgccatgacagaggaggcagctgttgcaatcaaggccatggcaaaataactggctcccaggatggcggtggtggcagcagtgatcctctgaacctgcagaggccccctccccgagcctggcctggctctggcccggtcctaagctggactcctcctacacaatttatttgacgttttattttggttttccccaccccctcaatctgtcggggagcccctgcccttcacctagctcccttggccaggagcgagcgaagctgtggccttggtgaagctgccctcctcttctcccctcacactacagccctggtgggggagaagggggtgggtgctgcttgtggtttagtcttttttttttttttttttttttttttaaattcaatctggaatcagaaagcggtggattctggcaaatggtccttgtgccctccccactcatccctggtctggtcccctgttgcccatagccctttaccctgagcaccaccccaacagactggggaccagccccctcgcctgcctgtgtctctccccaaacccctttagatggggagggaagaggaggagaggggaggggacctgccccctcctcaggcatctgggagggccctgcccccatgggctttacccttccctgcgggctctctccccgacacatttgttaaaatcaaacctgaataaaactacaagtttaatatgaaaaaaaaaaaaaaaaaaaaaaaaaaaaaaaaaaaaaaaaaaaaaaaaaaa

SEQ ID NO: 74 - protein, 154 aa, Homo sapien
MADDLDFETGDAGASATFPMQCSALRKNGFVVLKGRPCKIVEMSTSKTGKHGHAKVHLVGIDIFTGKKYEDICPSTHNMDVPNIKRNDFQLIGIQDGYLSLLQDSGEVREDLRLPEGDLGKEIEQKYDCGEEILITVLSAMTEEAAVAIKAMAK

SEQ ID NO: 75 - DNA, 1501 bp, Homo sapien
agcgagtccttcttttcctgactgcagctcttttcattttgccatccttctccagctccatgatggttctgcaggtttctgcggccccccggacagtggctctgacggcgttactgatggtgctgctcacatctgtggtccagggcagggccactccagagaattacgtgtaccagggacggcaggaatgctacgcgtttaatgggacacagcgcttcctggagagatacatctacaaccgggaggagtacgcgcgcttcgacagcgacgtgggggagttccgggcggtgacggagctggggcggcctgctgcggagtactggaacagccagaaggacatcctggaggagaagcgggcagtgccggacagggtatgcagacacaactacgagctggacgaggccgtgaccctgcagcgccgagtccagcctaaggtgaacgtttccccctccaagaaggggcccctgcagcaccacaacctgcttgtctgccacgtgacagatttctacccaggcagcattcaagtccgatggttcctgaatggacaggaggaaacagctggggtcgtgtccaccaacctgatccgtaatggagactggaccttccagatcctggtgatgctggaaatgaccccccagcagggagacgtctacatctgccaagtggagcacaccagcctggacagtcctgtcaccgtggagtggaaggcacagtctgattctgcccagagtaagacattgacgggagctgggggcttcgtgctggggctcatcatctgtggagtgggcatcttcatgcacaggaggagcaagaaagttcaacgaggatctgcataaacagggttcctgacctcaccgaaaagactaatgtgccttagaacaagcatttgctgtgttttgttaacacctggttccaggacagaccctcagcttcccaagaggatactgctgccaagaagttgctctgaagtcagtttctatcgttctgctctttgattcaaagcactgtttctctcactgggcctccaaccatgttcccttcttcttagcaccacaaataatcaaaacccaacataagtgtttgctttcctttaaaaatatgcatcaaatcgtctctcattacttttctctgagggttttagtaaacagtaggagttaataaagaagttcattttggtttacacgtaggaaagaagagaagcatcaaagtggagatatgttaactattgtataatgtggcctgttatacatgacactcttctgaattgactgtatttcagtgagctgcccccaaatcaagtttagtgccctcatccatttatgtctcagaccgctattcttaactattcaatggtgagcagactgcaaatctgcctgataggacccatattcccacagcactaattcaacatatatcttactgagagcatgttttatcattaccattaagaagttaaatgaacatcagaatttaaaatcataaatataatctaatacacttt

SEQ ID NO: 76 - protein, 258 aa, Homo sapien [sequence omitted]

SEQ ID NO: 77 - DNA, 2992 bp, Homo sapien
ggcacgaggggcggccggtgagggggaagcaagtctggtctctgtgattgaagaagtcggctctgggctccagtgcgggaatcacacacatacctcagaatgccgggtctaagttgtagattttatcaacacaaatttcctgaggtggaagatgtagtgatggtgaatgtcagatccattgctgaaatgggggcttatgtcagcttgctggaatacaacaacattgaaggcatgattcttcttagtgaattatccagaaggcgtatccgttctatcaacaaactcatccgaattggcaggaatgagtgtgtggttgtcattagggtggacaaagaaaaaggatatattgatttgtcaaaaagaagagtttctccagaggaagcaatcaaatgtgaagacaaattcacaaaatccaaaactgtttatagcattcttcgtcatgttgctgaggtgttagaatacaccaaggatgagcagctggaaagcctattccagaggactgcctgggtctttgatgacaagtacaagagacctggatatggtgcctatgatgcatttaagcatgcagtctcagacccatctattttggatagtttagatttgaatgaagatgaacgggaagtactcattaataatattaataggcgcttgaccccacaggctgtcaaaattcgagcagatattgaagtggcttgttatggttatgaaggcattgatgctgtaaaagaagccctaagagcaggtttgaattgttctacagaaaacatgcccattaagattaatctaatagctcctcctcggtatgtaatgactacgacaaccctggagagaacagaaggcctttctgtcctcagtcaagctatggctgttatcaaagagaagattgaggaaaagaggggtgtgttcaatgttcaaatggagcccaaagtggtcacagatacagatgagactgaacttgcgaggcagatggagaggcttgaaagagaaaatgccgaagtggatggagatgatgatgcagaagaaatggaagccaaagctgaagattaactttgtgggaaacagagtccaatttaaggaacacagagcagcgcttcctggctgtaaatcctagacttgaaagttttccagtattgaaaacttcaaagctgaatattttttatttctaagtatttaaatgttctaacagatcagaacatgaaatgccctcctaaatgtcagctgttgtcacacagtagctccaacactttgagcatttttaagggagtggcctcatttcactagagacaaatctttaagaatagttctaaaattgggcttgtgatttccatttctgatgtctccagattggcacccctttctagttcaatgcctcacgagatttgccaggggcatccaaggcaaacaatcccaatctttctatataaaatgtattcaagcaaacatcaaataaatttctgggatatttaactataggcttcttccttcttgtcaccagttaaaagcattttaatactaagaccctaattcttttatctttattttagtcttgatgtggaactgtaggagcaggtgaataaaggatctctataacagatcctttcaaaagaagagttttagagaaaataaatttaactttaaccacagtgaaagttgacccttagcgggacaaagccttaaaatgcattgaaagaattagatcggttctgtgccttttatctatttgagattgatgacaacctgtgtgagagaatttatcacaccacgtccttattggaataataagctacttgccttgagtttataattcagggtggtaaagtatgtttttaaattttaaaaagcagctgcattttttatttagttggaatatcacccaattttttatttttattgctattaaaatatccactagatgccacctagagctccagttctttataacaaaacagggatctgtttgaacacttactgttgtttttttttttttacatgtttccatcatttctgtctttaagaactaattcgtacataataagtttcataggtaacacattatattctcttatgatacttgaggtaccagttgtatttaattttattcattatccctagatagctattaagatacttagattagacctaacccaccatagtcaatccaagactagactactcaatattaaagggtctggaaaatagaagagtgtgttgggcaggtagtttgtaccatttatgaaggtttgttcctttgttaaatttagcagcctgtactagcttttgaaatccagaagttttaacttccagtggctggtttctgagagagtgccatgattgctagccagcattccatattgggaatatgtagaggagaacctggatgtacttaagagtggcatataattttcacttctgtctgttgaggcaaaaaaaaaacaagtttagaaagctggcaacatgaagaatgcattcaaaatataacaggtgcttctttgttgtacgcagaggaattttttcttttgattttgtttactgaaatttgttatacttcaaaagccataacttgaaaaatactggtggcgtcgatggtgagtgatttttatcccacgtgggccttttgctcagttccatggcaattttgtaaattgaccctagccagagaatagatcagtatttcactgataccacgaggaaaagaacaaacaaaacttaaaagtattcatacaccttgctaacctaaaagacagcagggacaagatacatatgaggacaaggtatacacccagttctgaataacttgaagaacaggcttggcaaagaagtaagtttatccaaatcttgaatttctgccaggcatggtagctcatgcctgtaaccctggcacttaaggggccaaggcaggaggatcacttgaggccagtgagctgtgatcactccagtgcactcgagcctgggtgacagggcaagaccctgtctcaaaaaaaaaaaaaaaaaa

SEQ ID NO: 78 - protein, 315 aa, Homo sapien
MPGLSCRFYQHKFPEVEDVVMVNVRSIAEMGAYVSLLEYNNIEGMILLSELSRRRIRSINKLIRIGRNECVVVIRVDKEKGYIDLSKRRVSPEEAIKCEDKFTKSKTVYSILRHVAEVLEYTKDEQLESLFQRTAWVFDDKYKRPGYGAYDAFKHAVSDPSILDSLDLNEDEREVLINNINRRLTPQAVKIRADIEVACYGYEGIDAVKEALRAGLNCSTENMPIKINLIAPPRYVMTTTTLERTEGLSVLSQAMAVIKEKIEEKRGVFNVQMEPKVVTDTDETELARQMERLERENAEVDGDDDAEEMEAKAED

SEQ ID NO: 79 - DNA, 2922 bp, Homo sapien
ggacaccgggccatgcacgcccccaactgaagctgcatctcaaagccgaagattccagcagcccaggggatttcaaagagctcagactcagaggaacatctgcggagagacccccgaagccctctccagggcagtcctcatccagacgctccgctagtgcagacaggagcgcgcagtggccccggctcgccgcgccatggagcggatccccagcgcgcaaccaccccccgcctgcctgcccaaagcaccgggactggagcacggagacctaccagggatgtaccctgcccacatgtaccaagtgtacaagtcaagacggggaataaagcggagcgaggacagcaaggagacctacaaattgccgcaccggctcatcgagaaaaagagacgtgaccggattaacgagtgcatcgcccagctgaaggatctcctacccgaacatctcaaacttacaactttgggtcacttggaaaaagcagtggttcttgaacttaccttgaagcatgtgaaagcactaacaaacctaattgatcagcagcagcagaaaatcattgccctgcagagtggtttacaagctggtgagctgtcagggagaaatgtcgaaacaggtcaagagatgttctgctcaggtttccagacatgtgcccgggaggtgcttcagtatctggccaagcacgagaacactcgggacctgaagtcttcgcagcttgtcacccacctccaccgggtggtctcggagctgctgcagggtggtacctccaggaagccatcagacccagctcccaaagtgatggacttcaaggaaaaacccagctctccggccaaaggttcggaaggtcctgggaaaaactgcgtgccagtcatccagcggactttcgctcactcgagtggggagcagagcggcagcgacacggacacagacagtggctatggaggagaatcggagaagggcgacttgcgcagtgagcagccgtgcttcaaaagtgaccacggacgcaggttcacgatgggagaaaggatcggcgcaattaagcaagagtccgaagaaccccccacaaaaaagaaccggatgcagctttcggatgatgaaggccatttcactagcagtgacctgatcagctccccgttcctgggcccacacccacaccagcctcctttctgcctgcccttctacctgatcccaccttcagcgactgcctacctgcccatgctggagaagtgctggtatcccacctcagtgccagtgctatacccaggcctcaacgcctctgccgcagccctctctagcttcatgaacccagacaagatctcggctcccttgctcatgccccagagactcccttctcccttgccagctcatccgtccgtcgactcttctgtcttgctccaagctctgaagccaatcccccctttaaacttagaaaccaaagactaaactctctaggggatcctgctgctttgctttccttcctcgctacttcctaaaaagcaacaaaaaagtttttgtgaatgctgcaagattgttgcattgtgtatactgagataatctgaggcatggagagcagattcagggtgtgtgtgtgtgtgtgtgtgtgtgtgtgtatgtgcgtgtgcgtgcacatgtgtgcctgcgtgttggtataggactttaaagctccttttggcatagggaagtcacgaaggattgcttgacatcaggagacttgggggggattgtagcagacgtctgggcttttccccacccagagaatagcccccttcgatacacatcagctggattttcaaaagcttcaaagtcttggtctgtgagtcactcttcagtttgggagctgggtctgtggctttgatcagaaggtactttcaaaagagggctttccagggctcagctcccaaccagctgttaggaccccacccttttgcctttattgtcgacgtgactcaccagacgtcggggagagagagcagtcagaccgagctttctgctaacatggggaggtagcaggcactggcatagcacggtagtggtttggggaggtttccgcaggtctgctccccacccctgcctcggaagaataaagagaatgtagttccctactcaggctttcgtagtgattagcttactaaggaactgaaaatgggccccttgtacaagctgagctgccccggagggagggaggagttccctgggcttctggcacctgtttctaggcctaaccattagtacttactgtgcagggaaccaaaccaaggtctgagaaatgcggacaccccgagcgagcaccccaaagtgcacaaagctgagtaaaaagctgcccccttcaaacagaactagactcagttttcaattccatcctaaaactccttttaaccaagcttagcttctcaaaggcctaaccaagccttggcaccgccagatcctttctgtaggctaattcctcttgcccaacggcatatggagtgtccttattgctaaaaaggattccgtctccttcaaagaagttttatttttggtccagagtacttgttttcccgatgtgtccagccagctccgcagcagcttttcaagatgcactatgcctgattgctgatcgtgttttaactttttcttttcctgtttttattttggtattaagtcgttgcctttatttgtaaagctgttataaatatatattatataaatatattaaaaaggaaaatgtttcagatgtttatttgtataattacttgattcacacagtgagaaaaaatgaatgtattcctgtttttgaagagaagaataatttttttttctctagggagaggtacagtgtttatattttggagccttcctgaaggtgtaaaattgtaaatatttttatctatgagtaaatgttaagtagttgttttaaaatacttaataaaataattcttttcctgtggaag

SEQ ID NO: 80 - protein, 412 aa, Homo sapien
MERIPSAQPPPACLPKAPGLEHGDLPGMYPAHMYQVYKSRRGIKRSEDSKETYKLPHRLIEKKRRDRINECIAQLKDLLPEHLKLTTLGHLEKAVVLELTLKHVKALTNLIDQQQQKIIALQSGLQAGELSGRNVETGQEMFCSGFQTCAREVLQYLAKHENTRDLKSSQLVTHLHRVVSELLQGGTSRKPSDPAPKVMDFKEKPSSPAKGSEGPGKNCVPVIQRTFAHSSGEQSGSDTDTDSGYGGESEKGDLRSEQPCFKSDHGRRFTMGERIGAIKQESEEPPTKKNRMQLSDDEGHFTSSDLISSPFLGPHPHQPPFCLPFYLIPPSATAYLPMLEKCWYPTSVPVLYPGLNASAAALSSFMNPDKISAPLLMPQRLPSPLPAHPSVDSSVLLQALKPIPPLNLETKD

SEQ ID NO: 81 - DNA, 2922 bp, Homo sapien; identical to SEQ ID NO: 79

SEQ ID NO: 82 - protein, 412 aa, Homo sapien; identical to SEQ ID NO: 80

SEQ ID NO: 83 - DNA, 3984 bp, Homo sapien
gtcctttcacgcgtgtcttcgtgttggtgcgcttttcactggtcataaagtgctgctcacggccgtgaactgctacagcgtgaaggccgccacccgggtccaggatgcttttgccgccgccaagctcctggccctggccctgatcatcctgctgggcttcgtccagatcgggaagggtgatgtgtccaatctagatcccaagttctcatttgaaggcaccaaactggatgtggggaacattgtgctggcattatacagcggcctctttgcctatggaggatggaattacttgaatttcgtcacagaggaaatgatcaacccctacagaaacctgcccctggccatcatcatctccctgcccatcgtgacgctggtgtacgtgctgaccaacctggcctacttcaccaccctgtccaccgagcagatgctgtcgtccgaggccgtggccgtggacttcgggaactatcacctgggcgtcatgtcctggatcatccccgtcttcgtgggcctgtcctgctttggctccgtcaatgggtccctgttcacatcctccaggctcttcttcgtggggtcccgggaaggccacctgccctccatcctctccatgatccacccacagctcctcacccccgtgccgtccctcgtgttcacgtgtgtgatgacgctgctctacgccttctccaaggacatcttctccgtcatcaacttcttcagcttcttcaactggctctgcgtggccctggccatcatcggcatgatctggctgcgccacagaaagcctgagcttgagcggcccatcaaggtgaacctggccctgcctgtgttcttcatcctggcctgcctcttcctgatcgccgtctccttctggaagacacccgtggagtgtggcatcggcttcaccatcatcctcagcgggctgcccgtctacttcttcggggtctggtggaaaaacaagcccaagtggctcctccagggcatcttctccacgaccgtcctgtgtcagaagctcatgcaggtggtcccccaggagacatagccaggaggccgagtggctgccggaggagcatgcgcagaggccagttaaagtagatcacctcctcgaacccactccggttccccgcaacccacagctcagctgcccatcccagtcctcgccgtccctcccaggtcgggcagtggaggctgctgtgaaaactctggtacgaatctcatccctcaactgagggccagggacccaggtgtgcctgtgctcctgcccaggagcagcttttggtctccttgggccctttttcccttccctcctttgtttacttatatatatattttttttaaacttaaattttgggtcaacttgacaccactaagatgattttttaaggagctgggggaaggcaggagccttcctttctcctgccccaagggcccagaccctgggcaaacagagctactgagacttggaacctcattgctaccacagacttgcactgaagccagacagctgcccagacacatgggcttgtgacattcgtgaaaaccaaccctgtgggcttatgtctctgccttagggtttgcagagtggaaactcagccgtagggtggcactgggagggggtgggggatctgggcaaggtgggtgattcctcccaggaggtgcttgaggccccgatggactcctgaccataatcctagccccgagacaccatcctgagccagggaacagccccagggttggggggtgccggcatctcccctagctcaccaggcctggcctctgggcagtgtggcctcttggctatttctgttccagttttggaggctgagttctggttcatgcagacaaagccctgtccttcagtcttctagaaacagagacaagaaaggcagacacaccgcggccaggcacccatgtgggcgcccaccctgggctccacacagcagtgtcccctgccccagaggtcgcagctaccctcagcctccaatgcattggcctctgtaccgcccggcagccccttctggccggtgctgggttcccactcccggcctaggcacctccccgctctccctgtcacgctcatgtcctgtcctggtcctgatgcccgttgtctaggagacagagccaagcactgctcacgtctctgccgcctgcgtttggaggcccctgggctctcacccagtccccacccgcctgcagagagggaactagggcaccccttgtttctgttgttcccgtgaatttttttcgctatgggaggcagccgaggcctggccaatgcggcccactttcctgagctgtcgctgcctccatggcagcagccaaggacccccagaacaagaagacccccccgcaggatccctcctgagctcggggggctctgccttctcaggccccgggcttcccttctccccagccagaggtggagccaagtggtccagcgtcactccagtgctcagctgtggctggaggagctggcctgtggcacagccctgagtgtcccaagccgggagccaacgaagccggacacggcttcactgaccagcggctgctcaagccgcaagctctcagcaagtgcccagtggagcctgccgcccccacctgggcaccgggaccccctcaccatccagtgggcccggagaaacctgatgaacagtttggggactcaggaccagatgtccgtctctcttgcttgaggaatgaagacctttattcacccctgccccgttgcttcccgctgcacatggacagacttcacagcgtctgctcataggacctgcatccttcctggggacgaattccactcgtccaagggacagcccacggtctggaggccgaggaccaccagcaggcaggtggactgactgtgttgggcaagacctcttccctctgggcctgttctcttggctgcaaataaggacagcagctggtgccccacctgcctggtgcattgctgtgtgaatccaggaggcagtggacatcgtaggcagccacggccccaggtccaggagaagtgctccctggaggcacggaccactgcttcccactggggccggcggggcccacgcacgacgtcagcctcttaccttcccgcctcggctaggggtcctcgggatgccgttctgttccaacctcctgttctgggaggtggacatgcctcaaggatacagggagccggcggcctctcgacggcacgcacttcctgttggctgctgcggctgtgggcgagcatgggggctgccagcgtctgttgtggaaagtagctgctagtgaaatggctggggccgctggggtccgtcttcacactgcgcaggtctcttctgggcgtctgagctggggtgggagctcctccgcagaaggttggtggggggtccagtctgtgatccttggtgctgtgtgccccactccagcctggggaccccacttcagaaggtaggggccgtgtcccgcggtgctgactgaggcctgcttccccctccccctcctgctgtgctggaattccacagggaccagggccaccgcaggggactgtctcagaagacttgatttttccgtccctttttctccacactccactgacaaacgtccccagcggtttccacttgtgggcttcaggtgttttcaagcacaacccaccacaacaagcaagtgcattttcagtcgttgtgcttttttgttttgtgctaacgtcttactaatttaaagatgctgtcggcaccatgtttatttatttccagtggtcatgctcagccttgctgctctgcgtggcgcaggtgccatgcctgctccctgtctgtgtcccagccacgcagggccatccactgtgacgtcggccgaccaggctggacaccctctgccgagtaatgacgtgtgtggctgggaccttctttattctgtgttaatggctaacctgttacactgggctgggttgggtagggtgttctggcttttttgtggggtttttatttttaaagaaacactcaatcatcctag

SEQ ID NO: 84 - protein, 241 aa, Homo sapien
MINPYRNLPLAIIISLPIVTLVYVLTNLAYFTTLSTEQMLSSEAVAVDFGNYHLGVMSWIIPVFVGLSCFGSVNGSLFTSSRLFFVGSREGHLPSILSMIHPQLLTPVPSLVFTCVMTLLYAFSKDIFSVINFFSFFNWLCVALAIIGMIWLRHRKPELERPIKVNLALPVFFILACLFLIAVSFWKTPVECGIGFTIILSGLPVYFFGVWWKNKPKWLLQGIFSTTVLCQKLMQVVPQET

SEQ ID NO: 85 - DNA, 1231 bp, Homo sapien
aggtctcagccggtcgtcgcgacgttcgcccgctcgctctgaggctcctgaagccgaaactagctagactttcctccttcccgcctgcctgtagcggcgttgttgccactccgccaccatgttcgaggcgcgcctggtccagggctccatcctcaagaaggtgttggaggcactcaaggacctcatcaacgaggcctgctgggatattagctccagcggtgtaaacctgcagagcatggactcgtcccacgtctctttggtgcagctcaccctgcggtctgagggcttcgacacctaccgctgcgaccgcaacctggccatgggcgtgaacctcaccagtatgtccaaaatactaaaatgcgccggcaatgaagatatcattacactaagggccgaagataacgcggataccttggcgctagtatttgaagcaccaaaccaggagaaagtttcagactatgaaatgaagttgatggatttagatgttgaacaacttggaattccagaacaggagtacagctgtgtagtaaagatgccttctggtgaatttgcacgtatatgccgagatctcagccatattggagatgctgttgtaatttcctgtgcaaaagacggagtgaaattttctgcaagtggagaacttggaaatggaaacattaaattgtcacagacaagtaatgtcgataaagaggaggaagctgttaccatagagatgaatgaaccagttcaactaacttttgcactgaggtacctgaacttctttacaaaagccactccactctcttcaacggtgacactcagtatgtctgcagatgtaccccttgttgtagagtataaaattgcggatatgggacacttaaaatactacttggctcccaagatcgaggatgaagaaggatcttaggcattcttaaaattcaagaaaataaaactaagctctttgagaactgcttctaagatgccagcatatactgaagtcttttctgtcaccaaatttgtacctctaagtacatatgtagatattgttttctgtaaataacctattttttttctctattctctccaatttgtttaaagaataaagtccaaagtctgatctggtctagttaacctagaagtatttttgtctcttagaaatacttgtgatttttataatacaaaagggtcttgactctaaatgcagttttaagaagtgtttttgaatttaaataaagttacttgaatttcaaac

SEQ ID NO: 86 - protein, 261 aa, Homo sapien
MFEARLVQGSILKKVLEALKDLINEACWDISSSGVNLQSMDSSHVSLVQLTLRSEGFDTYRCDRNLAMGVNLTSMSKILKCAGNEDIITLRAEDNADTLALVFEAPNQEKVSDYEMKLMDLDVEQLGIPEQEYSCVVKMPSGEFARICRDLSHIGDAVVISCAKDGVKFSASGELGNGNIKLSQTSNVDKEEEAVTIEMNEPVQLTFALRYLNFFTKATPLSSTVTLSMSADVPLVVEYKIADMGHLKYYLAPKIEDEEGS

SEQ ID NO: 87 - DNA, 1812 bp, Homo sapien
tagctaggcaggaagtcggcgcgggcggcgcggacagtatctgtgggtacccggagcacggagatctcgccggctttacgttcacctcggtgtctgcagcaccctccgcttcctctcctaggcgacgagacccagtggctagaagttcaccatgtctattctcaagatccatgccagggagatctttgactctcgcgggaatcccactgttgaggttgatctcttcacctcaaaaggtctcttcagagctgctgtgcccagtggtgcttcaactggtatctatgaggccctagagctccgggacaatgataagactcgctatatggggaagggtgtctcaaaggctgttgagcacatcaataaaactattgcgcctgccctggttagcaagaaactgaacgtcacagaacaagagaagattgacaaactgatgatcgagatggatggaacagaaaataaatctaagtttggtgcgaacgccattctgggggtgtcccttgccgtctgcaaagctggtgccgttgagaagggggtccccctgtaccgccacatcgctgacttggctggcaactctgaagtcatcctgccagtcccggcgttcaatgtcatcaatggcggttctcatgctggcaacaagctggccatgcaggagttcatgatcctcccagtcggtgcagcaaacttcagggaagccatgcgcattggagcagaggtttaccacaacctgaagaatgtcatcaaggagaaatatgggaaagatgccaccaatgtgggggatgaaggcgggtttgctcccaacatcctggagaataaagaaggcctggagctgctgaagactgctattgggaaagctggctacactgataaggtggtcatcggcatggacgtagcggcctccgagttcttcaggtctgggaagtatgacctggacttcaagtctcccgatgaccccagcaggtacatctcgcctgaccagctggctgacctgtacaagtccttcatcaaggactacccagtggtgtctatcgaagatccctttgaccaggatgactggggagcttggcagaagttcacagccagtgcaggaatccaggtagtgggggatgatctcacagtgaccaacccaaagaggatcgccaaggccgtgaacgagaagtcctgcaactgcctcctgctcaaagtcaaccagattggctccgtgaccgagtctcttcaggcgtgcaagctggcccaggccaatggttggggcgtcatggtgtctcatcgttcgggggagactgaagataccttcatcgctgacctggttgtggggctgtgcactgggcagatcaagactggtgccccttgccgatctgagcgcttggccaagtacaaccagctcctcagaattgaagaggagctgggcagcaaggctaagtttgccggcaggaacttcagaaaccccttggccaagtaagctgtgggcaggcaagcccttcggtcacctgttggctacacagacccctcccctcgtgtcagctcaggcagctcgaggcccccgaccaacacttgcaggggtccctgctagttagcgccccaccgccgtggagttcgtaccgcttccttagaacttctacagaagccaagctccctggagccctgttggcagctctagctttgcagtcgtgtaattggcccaagtcattgtttttctcgcctcactttccaccaagtgtctagagtcatgtgagcctcgtgtcatctccggggtggccacaggctagatccccggtggttttgtgctcaaaataaaaagcctcagtgacccatgag

SEQ ID NO: 88 - protein, 434 aa, Homo sapien
MSILKIHAREIFDSRGNPTVEVDLFTSKGLFRAAVPSGASTGIYEALELRDNDKTRYMGKGVSKAVEHINKTIAPALVSKKLNVTEQEKIDKLMIEMDGTENKSKFGANAILGVSLAVCKAGAVEKGVPLYRHIADLAGNSEVILPVPAFNVINGGSHAGNKLAMQEFMILPVGAANFREAMRIGAEVYHNLKNVIKEKYGKDATNVGDEGGFAPNILENKEGLELLKTAIGKAGYTDKVVIGMDVAASEFFRSGKYDLDFKSPDDPSRYISPDQLADLYKSFIKDYPVVSIEDPFDQDDWGAWQKFTASAGIQVVGDDLTVTNPKRIAKAVNEKSCNCLLLKVNQIGSVTESLQACKLAQANGWGVMVSHRSGETEDTFIADLVVGLCTGQIKTGAPCRSERLAKYNQLLRIEEELGSKAKFAGRNFRNPLAK

SEQ ID NO: 89 - DNA, 2287 bp, Homo sapien
ggctgaggcagtggctccttgcacagcagctgcacgcgccgtggctccggatcttcttcgtctttgcagcgtagcccgagtcggtcagcgccagaggacctcagcagccatgtcgaagccccatagtgaagccgggactgccttcattcagacccagcagctgcacgcagccatggctgacacattcctggagcacatgtgccgcctggacattgattcaccacccatcacagcccggaacactggcatcatctgtaccattggcccagcttcccgatcagtggagacgttgaaggagatgattaagtctggaatgaatgtggctcgtctgaacttctctcatggaactcatgagtaccatgcggagaccatcaagaatgtgcgcacagccacggaaagctttgcttctgaccccatcctctaccggcccgttgctgtggctctagacactaaaggacctgagatccgaactgggctcatcaagggcagcggcactgcagaggtggagctgaagaagggagccactctcaaaatcacgctggataacgcctacatggaaaagtgtgacgagaacatcctgtggctggactacaagaacatctgcaaggtggtggaagtgggcagcaagatctacgtggatgatgggcttatttctctccaggtgaagcagaaaggtgccgacttcctggtgacggaggtggaaaatggtggctccttgggcagcaagaagggtgtgaaccttcctggggctgctgtggacttgcctgctgtgtcggagaaggacatccaggatctgaagtttggggtcgagcaggatgttgatatggtgtttgcgtcattcatccgcaaggcatctgatgtccatgaagttaggaaggtcctgggagagaagggaaagaacatcaagattatcagcaaaatcgagaatcatgagggggttcggaggtttgatgaaatcctggaggccagtgatgggatcatggtggctcgtggtgatctaggcattgagattcctgcagagaaggtcttccttgctcagaagatgatgattggacggtgcaaccgagctgggaagcctgtcatctgtgctactcagatgctggagagcatgatcaagaagccccgccccactcgggctgaaggcagtgatgtggccaatgcagtcctggatggagccgactgcatcatgctgtctggagaaacagccaaaggggactatcctctggaggctgtgcgcatgcagaacctgattgcccgtgaggcagaggctgccatctaccacttgcaattatttgaggaactccgccgcctggcgcccattaccagcgaccccacagaagccaccgccgtgggtgccgtggaggcctccttcaagtgctgcagtggggccataatcgtcctcaccaagtctggcaggtctgctcaccaggtggccagataccgcccacgtgcccccatcattgctgtgacccggaatccccagacagctcgtcaggcccacctgtaccgtggcatcttccctgtgctgtgcaaggacccagtccaggaggcctgggctgaggacgtggacctccgggtgaactttgccatgaatgttggcaaggcccgaggcttcttcaagaagggagatgtggtcattgtgctgaccggatggcgccctggctccggcttcaccaacaccatgcgtgttgttcctgtgccgtgatggaccccagagcccctcctccagcccctgtcccacccccttcccccagcccatccattaggccagcaacgcttgtagaactcactctgggctgtaacgtggcactggtaggttgggacaccagggaagaagatcaacgcctcactgaaacatggctgtgtttgcagcctgctctagtgggacagcccagagcctggctgccccatcatgtggccccacccaatcaagggaagaaggaggaatgctggactggaggcccctggagccagatggcaagagggtgacagcttcctttcctgtgtgtactctgtccagttcctttagaaaaaatggatgcccagaggactcccaaccctggcttggggtcaagaaacagccagcaagagttaggggccttagggcactgggctgttgttccattgaagccgactctggccctggcccttacttgcttctctagctctctaggcctctccagtttgcacctgtccccaccctccactcagctgtcctgcagcaaacactccaccctccaccttccattttcccccactactgcagcacctccaggcctgttgccgc

SEQ ID NO: 90 - protein, 531 aa, Homo sapien
MSKPHSEAGTAFIQTQQLHAAMADTFLEHMCRLDIDSPPITARNTGIICTIGPASRSVETLKEMIKSGMNVARLNFSHGTHEYHAETIKNVRTATESFASDPILYRPVAVALDTKGPEIRTGLIKGSGTAEVELKKGATLKITLDNAYMEKCDENILWLDYKNICKVVEVGSKIYVDDGLISLQVKQKGADFLVTEVENGGSLGSKKGVNLPGAAVDLPAVSEKDIQDLKFGVEQDVDMVFASFIRKASDVHEVRKVLGEKGKNIKIISKIENHEGVRRFDEILEASDGIMVARGDLGIEIPAEKVFLAQKMMIGRCNRAGKPVICATQMLESMIKKPRPTRAEGSDVANAVLDGADCIMLSGETAKGDYPLEAVRMQNLIAREAEAAIYHLQLFEELRRLAPITSDPTEATAVGAVEASFKCCSGAIIVLTKSGRSAHQVARYRPRAPIIAVTRNPQTARQAHLYRGIFPVLCKDPVQEAWAEDVDLRVNFAMNVGKARGFFKKGDVVIVLTGWRPGSGFTNTMRVVPVP

SEQ ID NO: 91 - DNA, 2644 bp, Homo sapien
ccgaggccaagtcccgggcgctagcccacctcccacccgcctcttggctcctctcctctaggccgtcgctttcgggttctctcatcgcttcgtcgttcgccaatgtttgaggagaaggccagcagtccttcagggaagatgggaggcgaggagaagccgattggtgctggtgaagagaagcaaaaggaaggaggcaaaaagaagaacaaagaaggatctggagatggaggtcgagctgagttgaatccttggcctgaatatatttacacacgtcttgagatgtataatatactaaaagcagaacatgattccattctggcagaaaaggcagaaaaagatagcaagccaattaaagtcactttgcctgatggtaaacaggttgatgcggaatcttggaaaactacaccatatcaaattgcctgtggaattagtcaaggcctggccgacaacaccgttattgctaaagtaaataatgttgtgtgggacctggaccgccctctggaagaagattgtaccttggagcttctcaagtttgaggatgaggaagctcaggcagtgtattggcactctagtgctcacataatgggtgaaggcatggaaagagtctatggtggatgtttatgctacggtccgccaatagaaaatggattctattatgacatgtacctcgaagaagggggtgtgtctagcaatgatttctcttctctggaggctttgtgtaagaaaatcattaaagaaaaacaagcttttgaaagactggaagttaagaaagaaactttactggcaatgtttaagtacaacaagttcaaatgccggatattgaatgaaaaggtgaatactccaactaccacagtctatagatgtggccctttgatagatctctgccggggtcctcatgttagacacacgggcaaaattaaggctttaaaaatacacaaaaattcctccacgtactgggaaggcaaagcagatatggagactctccagagaatttatggcatttcattcccagatcctaaaatgttgaaagagtgggagaagttccaagaggaagctaaaaaccgagatcataggaaaattggcagggaccaagaactatatttctttcatgaactcagccctggaagttgcttttttctgccaaaaggagtctatatttataatgcacttattgaattcattaggagcgaatataggaaaagaggattccaggaggtagtcaccccaaacatcttcaacagccgactctggatgacctcgggccactggcagcactacagcgagaacatgttctcctttgaggtggagaaggagctgtttgccctgaaacccatgaactgcccaggacactcccttatgtttgatcatcggccaaggtcctggcgagaactgcctctgcggctagctgattttgggggtcttcataggaacgagctgtctggagcactcacaggactcacccgggtacgaagattccaacaggatgatgctcacatattctgtgccatggagcagattgaagatgaaataaaaggttgtttggattttctacgtacggtatatagcgtatttggattttcttttaaactaaacctttctactcgcccggaaaaattccttggagatatcgaagtatgggatcaagctgagaaacaacttgaaaacagtctgaatgaatttggtgaaaagtgggagttaaactctggagatggagctttctatggcccaaagattgacatacagattaaagatgcgattgggcggtaccaccagtgtgcaaccatccagctggatttccagttgcccatcagatttaatcttacttatgtaagccatgatggtgaggataagaaaaggccagtgattgttcatcgagccatcttgggatcagtggaaagaatgattgctatcctcacagaaaactatgggggcaaattggcccccttttggctgtcccctcgccaggtaatggtagttccagtgggaccaacctgtgatgaatatgcccaaaacgtacgacaacaattccacgatgccaaattcatggcagacattgatctggatccaggctgtacattgaataaaaagattcgaaatgcacagttagcacagtataacttcattttagttgttggtgaaaaagagaaaatcactggcactgttaatatccgcacaagagacaataaggtccacggggaacgcaccatttctgaaactatcgagcggctacagcagctcaaagagttccgcagcaaacaggcagaagaagaattttaatgaaaaaattacccagattggctccatggaaaaggaggaacagcgtttccgtaaaattgactttgtactcgaaaacgtcaatttatattgaacttggaggaggagtttggcaaagtctgaaataggtcaacctgcaggcgtaactatttttgacctagtcagtttttaaacaatgtgcatttgaaggagttaattaaaagagagccaataaaatgattttactcattcagtatctgagtactggaagtgaaacatgaggaatgctttagtgtaatgtgggagaacttttttgtaaatttaatgcaattgaaaaagttttcaaattcaattaagataactagaattggttatggtgtaacccgaattc

SEQ ID NO: 92 - protein, 712 aa, Homo sapien
MGGEEKPIGAGEEKQKEGGKKKNKEGSGDGGRAELNPWPEYIYTRLEMYNILKAEHDSILAEKAEKDSKPIKVTLPDGKQVDAESWKTTPYQIACGISQGLADNTVIAKVNNVVWDLDRPLEEDCTLELLKFEDEEAQAVYWHSSAHIMGEGMERVYGGCLCYGPPIENGFYYDMYLEEGGVSSNDFSSLEALCKKIIKEKQAFERLEVKKETLLAMFKYNKFKCRILNEKVNTPTTTVYRCGPLIDLCRGPHVRHTGKIKALKIHKNSSTYWEGKADMETLQRIYGISFPDPKMLKEWEKFQEEAKNRDHRKIGRDQELYFFHELSPGSCFFLPKGVYIYNALIEFIRSEYRKRGFQEVVTPNIFNSRLWMTSGHWQHYSENMFSFEVEKELFALKPMNCPGHSLMFDHRPRSWRELPLRLADFGGLHRNELSGALTGLTRVRRFQQDDAHIFCAMEQIEDEIKGCLDFLRTVYSVFGFSFKLNLSTRPEKFLGDIEVWDQAEKQLENSLNEFGEKWELNSGDGAFYGPKIDIQIKDAIGRYHQCATIQLDFQLPIRFNLTYVSHDGEDKKRPVIVHRAILGSVERMIAILTENYGGKLAPFWLSPRQVMVVPVGPTCDEYAQNVRQQFHDAKFMADIDLDPGCTLNKKIRNAQLAQYNFILVVGEKEKITGTVNIRTRDNKVHGERTISETIERLQQLKEFRSKQAEEEF

SEQ ID NO: 93 - DNA, 1793 bp, Homo sapien
ggcaccgcgcgggacggagcttggctgttggtcggtgggttcccgtgcggcggcggccaaggaggaggagacacagttggagcagctccgtgggctgactggggcgaggcctcagcagcgcgagcttgagtgcggccgagcctgcggcgccttcccctgcgggtggggacgagcgggccccgcggcgtcatcggcggcgaggagccgccgcgcctcggcctagcatgtcggaagcgggcgaggagcagcccatggagacgacgggcgccaccgagaacggacatgaggccgtccccgaagcgagtcgcggccggggctggacgggcgccgcggcggggctggaggcgcgaccgccgcgcccccgagcgggaatcagaacggcgccgagggaccagatcaacgccagcaagaacgaggaggacgcgggaaaaatgttcgttggtggcctgagctgggatactagcaaaaaagatttaaaagactattttactaaatttggagaggtcgttgactgtacaataaaaatggatcccaacactggacggtcaagagggtttgggtttatcctgttcaaagatgcagccagtgtggagaaggtcctagaccagaaggagcacaggctggatggccgtgtcattgaccctaaaaaggccatggctatgaagaaggacccggtcaagaaaatcttcgttgggggtctgaatcctgaaagtcccactgaggaaaagatcagggagtactttggcgagtttggggagattgaggccattgaattgccaatggatccaaagttgaacaaaagacgaggttttgtgtttatcacctttaaagaagaagaacccgtgaagaaggttctggagaaaaagttccatactgtcagtggaagcaagtgtgagatcaaggtggcccagcccaaagaagtctatcagcagcagcagtatggctctgggggccgtggaaaccgcaaccgagggaaccgaggcagcggaggtggtggtggaggtggaggtcagagtcagagttggaatcagggctacggcaactactggaaccagggctacggctaccagcagggctacgggcctggctatggcggctacgactactcgccctatggctattacggctacggccccggctacgactacagtcagggtagtacaaactacggcaagagccagcgacgtggtggccatcagaataactacaagccatactgaggcggccaagggagcgaccaactgatcgcacacatgctttgtttggatatggagtgaacacaattatgtaccaaatttaacttggcaaactttctattgcctgtcccatgtgcatcttatttaaaatttcccccatggaaatcactctcctgttgactatttccagagctctaggtgtttaggcagcgtgtggtgtctgagaggccatagcgccatcatgggctgatttttattaccaggtcccccagaagcaggtgagaggctctgcttcctgctgccgctctgcagcctggacctgtggaccctggttgtaaagagtaaattgtatcttaggaaaccagtgtcacctttttttcaccttttaattttatattatttgcgtcatacatttcctgtaacggaagtgttaattttactgtactttttggtaccccttttgggaatctaatgtattgtaaggtattttacacgtgtcctgattttgccacaacctggatattgaagctatccaagcttttgaaataaaatttaaaaaccccaagcctgggtgagtgtgggaaaaaaaaaaaaaaa

SEQ ID NO: 94 - protein, 331 aa, Homo sapien
MSEAGEEQPMETTGATENGHEAVPEASRGRGWTGAAAGLEARPPRPRAGIRTAPRDQINASKNEEDAGKMFVGGLSWDTSKKDLKDYFTKFGEVVDCTIKMDPNTGRSRGFGFILFKDAASVEKVLDQKEHRLDGRVIDPKKAMAMKKDPVKKIFVGGLNPESPTEEKIREYFGEFGEIEAIELPMDPKLNKRRGFVFITFKEEEPVKKVLEKKFHTVSGSKCEIKVAQPKEVYQQQQYGSGGRGNRNRGNRGSGGGGGGGGQSQSWNQGYGNYWNQGYGYQQGYGPGYGGYDYSPYGYYGYGPGYDYSQGSTNYGKSQRRGGHQNNYKPY

SEQ ID NO: 95 - DNA, 3268 bp, Homo sapien
gccggggaagtcatgctcgcttcacggaggcaatagctagccggtgtctgtgggaggttatgtttatttgagacttctccatcgggatcgcctggtgtcaccaagtgtccactggtactgaggtttgctgcctgccttcttgccatgtctaacgaagtagaaacaagtgcaaccaatggtcagcccgaccaacaggccgcaccaaaagcaccctcaaagaaggaaaaaaagaaaggccctgaaaagacagatgaatatctcctagcaaggttcaaaggcgatggcgtaaaatataaggccaagctgattggcattgatgatgtgccagatgcaagaggggataaaatgagccaagactctatgatgaaactaaagggaatggcggcacgtggtcggtctcagggacaacacaaacaaaggatctgggtcaacatttccctttctgggataaaaataattgatgagaaaactggggtaatagagcatgaacatccagtaaataagatttctttcattgcccgtgatgtgacagacaaccgggcatttggttacgtgtgtggaggagaaggccagcatcagttttttaccataaaaaccgggcaacaggctgaaccattagttgttgatcttaaagacctttttcaagttatctataatgtaaagaaaaaggaagaagaaaagaaaaagatagaggaagccagcaaagcagttgagaatgggagtgaggccctaaggattctagatgaccaaactaacaaactgaaatcgggtgttgaccagatggatttgtttggggacatgtctacacctcctgacctaaatagtccaacagaaagcaaagatatcctgttagtggatctaaactctgaaatcgacaccaatcagaattctttaagagaaaatccattcttaacaaacggcatcacctcctgttctcttcctcgaccaacgcctcaggcatccttcttgcctgaaaatgccttttctgccaatctcaacttctttcccacccctaatcctgatcctttccgtgacgatcctttcacacagccagaccaatcgacaccttcttcgtttgattctctcaaatctccagatcagaagaaagagaattcgagtagctcgtctactccgctgagtaatgggcccctgaatggtgatgttgactactttggtcagcaatttgaccagatctctaaccggactggcaaacaggaagctcaggcaggcccatggcccttttcaagttcgcaaacccagccagcagtgagaactcaaaatggggtatctgaaagagaacagaacggcttctctgtcaaatcctccccgaacccttttgtgggaagccctcccaaaggactgtccatacagaatggcgtaaagcaggacttggaaagctctgtccagtcctcaccacatgactccatagccattatcccacctccacaaagtaccaaaccaggaagaggcagaaggactgctaagtcttcagccaatgacttgcttgcatcagacatctttgctcctcccgtctcagaaccttcaggccaggcgtcacccacaggacaacctacagccctgcagcccaaccctctggatctcttcaaaacaagtgctcctgccccagtggggcccctggtgggtctaggtggtgtaactgtcacactccctcaggcaggaccatggaacacagcatctttggtcttcaatcagtccccttcaatggctccgggagccatgatgggtggtcaaccttcaggttttagtcagcccgtcatttttggtacaagtccagctgtttcaggttggaaccagccttcaccctttgcagcctcaactccccctccagtgcctgttgtctggggcccttctgcatctgtggcacccaatgcttggtcaacaacaagccctttggggaatccttttcagagcaatatttttccagctcctgctgtgtccactcagcccccatccatgcactcctctctcctggtcactcctcctcagccacctcccagagctggccctcccaaggacatctccagtgatgccttcactgccttagacccacttggggataaagagatcaaggatgtgaaagaaatgtttaaggatttccaactgcggcagccacctgctgtgcccgcgcggaagggagagcagacttcttctgggactttgagtgcctttgccagttatttcaacagcaaggttggcattcctcaggagaatgcagaccatgatgactttgatgctaatcaactattgaacaagatcaatgaaccaccaaagccagctcccagacaagtttccctgccagttaccaaatctactgacaatgcatttgagaaccctttctttaaagattcttttggttcatcacaagcctctgtggcttcttctcaacctgtatcttctgagatgtatagggatccatttggaaatccttttgcctaaattctgaacttggtctgcagaccatccagaggaataaaaaggttggccttagtagtcaaaaacaaagctgatagccagacacgttctgatttctgcccttgttccagctttgacgtattatctgttgccttatttctcattgcctcttctacttgtaaaatgcttttcactttctgtctaggttaaagctaaactgaatctatggctttaaataaattaagatcctaaactctctagcttaagtgtaaatgaagtacagtagtttccctactgaaccctacctcttgtgtccctggaaccttctagaacacctgccttctaccctctggttgggagatgcagccaccacatcccttcatatcatactgttttgaataaattttcaaatccttattgttcagagttgtttgggggttctgtttcagagcataaaacctaaaggttatagtagaacaaggcaccttcttaaaagaaatcttgcttcagaccatcagttacagagaatttcctaaagtaaaattgaagcaactacaacttctccttagacactttggaatctaaccacttaaggacctttttaaagagatagcttctcttctttctgaagatcaatttctcccaaggccaagattgtccttttctcccatttcttgctagctattgcaaatgagggaagaacattattcatctctcctccccttttttttctgattcttttttcagtcagttttgctcctgggttcaagtagtattaccaccctttcacaagcaacagactctcacagggcaaaaaaaaaaaaaaaaaaaaaaa

SEQ ID NO: 96 - protein, 770 aa, Homo sapien
MSNEVETSATNGQPDQQAAPKAPSKKEKKKGPEKTDEYLLARFKGDGVKYKAKLIGIDDVPDARGDKMSQDSMMKLKGMAARGRSQGQHKQRIWVNISLSGIKIIDEKTGVIEHEHPVNKISFIARDVTDNRAFGYVCGGEGQHQFFTIKTGQQAEPLVVDLKDLFQVIYNVKKKEEEKKKIEEASKAVENGSEALRILDDQTNKLKSGVDQMDLFGDMSTPPDLNSPTESKDILLVDLNSEIDTNQNSLRENPFLTNGITSCSLPRPTPQASFLPENAFSANLNFFPTPNPDPFRDDPFTQPDQSTPSSFDSLKSPDQKKENSSSSSTPLSNGPLNGDVDYFGQQFDQISNRTGKQEAQAGPWPFSSSQTQPAVRTQNGVSEREQNGFSVKSSPNPFVGSPPKGLSIQNGVKQDLESSVQSSPHDSIAIIPPPQSTKPGRGRRTAKSSANDLLASDIFAPPVSEPSGQASPTGQPTALQPNPLDLFKTSAPAPVGPLVGLGGVTVTLPQAGPWNTASLVFNQSPSMAPGAMMGGQPSGFSQPVIFGTSPAVSGWNQPSPFAASTPPPVPVVWGPSASVAPNAWSTTSPLGNPFQSNIFPAPAVSTQPPSMHSSLLVTPPQPPPRAGPPKDISSDAFTALDPLGDKEIKDVKEMFKDFQLRQPPAVPARKGEQTSSGTLSAFASYFNSKVGIPQENADHDDFDANQLLNKINEPPKPAPRQVSLPVTKSTDNAFENPFFKDSFGSSQASVASSQPVSSEMYRDPFGNPFA

SEQ ID NO: 97 - DNA, 3268 bp, Homo sapien; identical to SEQ ID NO: 95

SEQ ID NO: 98 - protein, 770 aa, Homo sapien; identical to SEQ ID NO: 96

SEQ ID NO: 99 - DNA, 3116 bp, Homo sapien
agcgctcagatacgcgacgcgtagcaggcggggaccgaacgggtgcctcagtgtccttcccctcccctcgcctggcctcgccgtcctctccccgcagccggaccggaactatgtgatcccggaagttccggggcctttgctgtgtgggataaacagtaatggcggaggctgcaactcccggaacaacagccacaacatcaggagcaggagcggcagcggcgacggcggcagcagcctcccccaccccgatccccacagtcaccgccccgtccctgggggcgggcggagggggcggcggcagcgacggcagcggcggcggctggactaaacaggtcacctgcaggtattttatgcatggggtttgtaaggaaggagacaactgtcgctactcgcatgacctctctgacagtccgtatagtgtagtgtgcaagtattttcagcgagggtactgtatttatggagaccgctgcagatatgaacatagcaaaccattgaaacaggaagaagcaactgctacagagctaactacaaagtcatcccttgctgcttcctcaagtctctcatcgatagttggaccacttgttgaaatgaatacaggcgaagctgagtcaagaaattcaaactttgcaactgtaggagcaggttcagaggactgggtgaatgctattgagtttgttcctgggcaaccctactgtggccgtactgcgccttcctgcactgaagcacccctgcagggctcagtgaccaaggaagaatcagagaaagagcaaaccgccgtggagacaaagaagcagctgtgcccctatgctgcagtgggagagtgccgatacggggagaactgtgtgtatctccacggagattcttgtgacatgtgtgggctgcagctcctgcatccaatggatgctgcccagagatcgcagcatatcaaatcgtgcattgaggcccatgagaaggacatggagctctcatttgccgtgcagcgcagcaaggacatggtgtgtgggatctgcatggaggtggtctatgagaaagccaaccccagtgagcgccgcttcgggatcctctccaactgcaaccacacctactgtctcaagtgcattcgcaagtggaggagtgctaagcaatttgagagcaagatcataaagtcctgcccagaatgccggatcacatctaactttgtcattccaagtgagtactgggtggaggagaaagaagagaagcagaaactcattctgaaatacaaggaggcaatgagcaacaaggcgtgcaggtattttgatgaaggacgtgggagctgcccatttggagggaactgtttttacaagcatgcgtaccctgatggccgtagagaggagccacagagacagaaagtgggaacatcaagcagataccgggcccaacgaaggaaccacttctgggaactcattgaggaaagagagaacagcaacccctttgacaacgatgaagaagaggttgtcacctttgagctgggcgagatgttgcttatgcttttggctgcaggtggggacgacgaactaacagactctgaagatgagtgggacttgtttcatgatgagctggaagatttttatgacttggatctatagcaaccttgcgtggcgtgtgaactggtctgctgacctcagacagcagctgtcccctgtggtggtgtggcagtgcctgtgttctctcctaggcaggcctctcaactccaggtgctgtcctaagaatttttacccagggcctgtcttctcaacccctcacctttccctgaggagtgtgttgttttccctgttgaaaaaagttacaaaaataaatcttaaagttagttttttgtaacacgaatttaactgtcagacagttagtgtaggtgtgttgcgtcatctgttttcaaccagattgcatttatggacttttcacacactcattttgaggaccccaggttcaaaagtaaaagcagtggccctgctttggggtccaagaataggagtgatgggtgaagggacctaagctggccaatagccctctgccccagacatgggatgtggatccttgaggtttctggtgaaatctgcacatctgtgtttttatatctgttccctaccctgtaatccctaccacgtgcacttgttctgtggttttggtctcttgtttaattgcacacaagtaatactactgggtaaccagaatcaggtgtgaatgtgttgagattttttactgttttgcatgataggaaaattgagaaagaatacgtataaaagatagagaggcataacatcaatgcagagttggaagttggctcccaagggctgacatggtgtgagtgtgtgggtgtgtgataagcttctcatccctgcatagatgcagtattcttagccttagtagaaaaacctggtttagtggtttaagccttgtgtggcagatagatcttaaagggcaaagcagtatattggtagttgtcaatatagcagtgctagctctgtctatataaatagagaaatggggttagccatagaggttaaaactacctggttatcccatataataacacaaactgggtcttggatacacagttgtatttaatgttttacgatctagcctttccagtacaggcactttctgagaaacctttgtcctcacttgaggcattttgttgtcgggtttttgtgtttgtttttgtgggtatttgcctcattccacccctgagctttcaggtagacagacgtgattcaaaactctgttctaaggtgtttattgtagtggagtaatgggtttgcagtgataagtcatacttttccaccgaaagggagggcttgggaatccctgagattagctaaagttaagttgttggaagaattccttgattggaaattgtacctttgtgttttgttgctctgtttcctgaaaataactcggggatgctcctggtttgtccatctactgctttgattccttggatcccacccattctttcactttaagaaaaaacaaataattgttgcagaggtctctgtattttgcagctgcccttttgtaagaagcacttttcccaaataaaacaattaaaaaaaaaaaaaaaaaaaaaaaaaaaaaaaaaaaaaaaaaaaaaaaaaaaa

SEQ ID NO: 100 - protein, 482 aa, Homo sapien
MAEAATPGTTATTSGAGAAAATAAAASPTPIPTVTAPSLGAGGGGGGSDGSGGGWTKQVTCRYFMHGVCKEGDNCRYSHDLSDSPYSVVCKYFQRGYCIYGDRCRYEHSKPLKQEEATATELTTKSSLAASSSLSSIVGPLVEMNTGEAESRNSNFATVGAGSEDWVNAIEFVPGQPYCGRTAPSCTEAPLQGSVTKEESEKEQTAVETKKQLCPYAAVGECRYGENCVYLHGDSCDMCGLQLLHPMDAAQRSQHIKSCIEAHEKDMELSFAVQRSKDMVCGICMEVVYEKANPSERRFGILSNCNHTYCLKCIRKWRSAKQFESKIIKSCPECRITSNFVIPSEYWVEEKEEKQKLILKYKEAMSNKACRYFDEGRGSCPFGGNCFYKHAYPDGRREEPQRQKVGTSSRYRAQRRNHFWELIEERENSNPFDNDEEEVVTFELGEMLLMLLAAGGDDELTDSEDEWDLFHDELEDFYDLDL

SEQ ID NO: 101 - DNA, 2096 bp, Homo sapien
  Unsure 23: Unknown base
  Unsure 27: Unknown base
  Unsure 80: Unknown base
  Unsure 120: Unknown base
agatgtttaaaaatactttgatnctcngtttccacctctcttaaattgtctttccctatgttaaatatacagtcatcacnttgctgaaaaaagttcgcaatgagaacaatcatctaaaantggctgtaactaggtcaggcgcggttgctcatgcctgtaatcccaccactttgggaggccgaggcaattggatcacctgaggtcaggattttgagaccagcttgaccaacatggtggaatcccatctctactaaaaatacaaaaaattagccgggtgtggtggcacacccctgtaatcccacctactcaggaggctgaggcaggaaaatcccttgaacccaggaggcaaaggttgcattgagccgaaataacaccactgcactccagcctggacgatagagtgagaccccatctcaaaaaaagagcagctgtgacaaatgcctgtattgaattgcaggtcagtcttccacctccactaccggtgccaaaaaaagggctgccccaaaaggaactaaaagggatccagctttgaattctggtgtctctcaaaagcctgatcctgccaaaaccaagaatcgccgcaaaaggaagccatccacttctgatgattctgactctaattttgagaaaattgtttcgaaagcagtcacaagcaaggtgagtgttgatcctagtcagtccttttgctgtagatgttctgaaacacgtaactaagccattgttcttaaaaatttggcatatctttaagaaaattaactctcatattctgttagcttttactgtacatatttagttttaacaaagttaaatatgccacttatttggccaatggaagagttggccttagatctgcttcttattacttggtagaaaatagaaaactccttgaatatagtgtcttgatacatttttttacattacaattatgttgtcagatttacaatgtgcaagttacctgggcttttctcttttagaaatccaagggggagagtgatgacttccatatggactttgactcagctgtggctcctcgggcaaaatctgtacgggcaaagaaacctataaagtacctggaagagtcagatgaagatgatctgttttaaaatgtgaggcgattattttaagtaattatcttaccaagcccaagactggttttaaagttacctgaagctcttaacttcctcccctctgaatttagtttggggaaggtgtttttagtacaagacatcaaagtgaagtaaagcccaagtgttctttagctttttataatactgtataaatagtgaccatctcatgggcattgttttcttctctgctttgtctgtgttttgagtctgcttcttttgtctttaaaacctgatttttaagttcttctgaactgtagaaatagctatctgatcacttcagcgtaaagcagtgtgtttattaaccatccactaagctaaaactagagcagtttgatttaaaagtgtcactcttcctccttttctactttcagtagatatgagatagagcataattatctgttttatcttagttttatacataatttaccatcagatagaactttatggttctagtacagatactctactacactcagcctcttatgtgccaagtttttctttaagcaatgagaaattgctcatgttcttcatcttctcaaatcatcagaggccgaagaaaaacactttggctgtgtctataacttgacacagtcaatagaatgaagaaaattagagtagttatgtgattatttcagctcttgacctgtcccctctggctgcctctgagtctgaatctcccaaagagagaaaccaatttctaagaggactggattgcagaagactcggggacaacatttgatccaagatcttaaatgttatattgataaccatgctcagcaatgagctattagattcattttgggaaatctccataatttcaatttgtaaactttgttaagacctgtctacattgttatatgtgtgtgacttgagtaatgttatcaacgtttttgtaaatatttactatgtttttctattagctaaattccaacaattttgtactttaataaaatgttctaaacattgaaa

SEQ ID NO: 102 - DNA, 1763 bp, Homo sapien
tagctggattccagccattgctgcagctgctccacagcccttttcaggacccaaacaaccgcagccgctgttcccaggatggtgatccgtgtatatattgcatcttcctctggctctacagcgattaagaagaaacaacaagatgtgcttggtttcctagaagccaacaaaataggatttgaagaaaaagatattgcagccaatgaagagaatcggaagtggatgagagaaaatgtacctgaaaatagtcgaccagccacaggttaccccctgccacctcagattttcaatgaaagccagtatcgcggggactatgatgccttctttgaagccagagaaaataatgcagtgtatgccttcttaggcttgacagccccacctggttcaaaggaagcagaagtgcaagcaaagcagcaagcatgaaccttaagcactgtgctttaagcatcctgaaaaatgagtctccattgcttttataaaatagcagaattagctttgcttcaaaagaaataggcttaatgttgaaataatagattagttgggttttcacatgcaaacattcaaaatgaatacaaaattaaaatttgaacattatggtgattatggtgaggagaatgggatattaacataaaattatattaataagtagatatcgtagaaatagtgttgttacctgccaagccatcctgtatacaccaatgattttacaaagaaaacacccttccctccttctgccattactatggcaacttaagtgtatctgcagctctacattaaaaaggagaaagagaaataacctgtctctcattcctaagttgcctcattaattttcatgaacaagaatatgtacctttttgatgctatattactgcgattaaaaaagttcttgcaggtaatgtttatgtatagttaaacgttgtaatttcttatcgtaattataacattcccattctttgtagatgaaactctacatatgaaccacagattttctgagcttctaaatgtagcctttcattgcacatttcagtgatcagaatagatatccttttacacgcacaaaagcaatagattcattcagtggacaagttccttgtttaactacacagctatgatggaatcatatatccaagttccttgcctcagtgaaatatgcatatgtatatcatgaagtgggatgccaagtaagcttaaaatgcattctctagcaaagagattagacttttaaataactcttataaaacaggttggcgatcatttcccaagattggtttcccttgagtttttgttaaaacaaatcttagtagttttgcccgtttaaaacaactcacaatcgtaaatgctactattcctaagatatcttacctttttatttcagtttagccatgtattgtatgagtgtattagtctaagcagtgagaatcttttctatgcctctattccagcaaaaagtagaagtatcaaataaaaagggcaacttttaaaatattaagcctgaagacttctaaaaagacaagaaacatggcctaaataaccaacatagatttacatagtaagtttcacactaccttattaccaaaagcaaacacctcttactttaaactacattatcatgtatatctattgtatgctggtctttactttttgccaaaatcaacatataatgaagagatgcctttgtttgatgagattcaaacttgatgctatgctttaaaataaactcagtacttttagaaacataaaaaaaaaaaaaaaaaaaaaaaaaa

SEQ ID NO: 103 - protein, 114 aa, Homo sapien
MVIRVYIASSSGSTAIKKKQQDVLGFLEANKIGFEEKDIAANEENRKWMRENVPENSRPATGYPLPPQIFNESQYRGDYDAFFEARENNAVYAFLGLTAPPGSKEAEVQAKQQA

SEQ ID NO: 104 - DNA, 2562 bp, Homo sapien
gccgcgccggctctgggcactcagcatcgtttccttttcctccgctggagcagctatggcggcggtgaagaccctgaaccccaaggccgaggtggcccgagcgcaggcggcgctggcggtcaacatcagcgcagcgcggggtctgcaggacgtgctaaggaccaacctggggcccaagggcaccatgaagatgctcgtttctggcgctggagacatcaaacttactaaagacggcaatgtgctgcttcacgaaatgcaaattcaacacccaacagcttccttaatagcaaaggtagcaacagcccaggatgatataactggtgatggtacgacttctaatgtcctaatcattggagagctgctgaaacaggcggatctctacatttctgaaggccttcatcctagaataatcactgaaggatttgaagctgcaaaggaaaaggcccttcagtttttggaagaagtcaaagtaagcagagagatggacagggaaacacttatagatgtggccagaacatctcttcgtactaaagttcatgctgaacttgcagatgtcttaacagaggctgtagtggactccattttggccattaaaaagcaagatgaacctattgatctcttcatgattgagatcatggagatgaaacataaatctgaaactgatacaagcttaatcagagggcttgttttggaccacggagcacggcatcctgatatgaagaaaagggtggaggatgcatacatcctcacttgtaacgtgtcattagagtatgagaaaacagaagtgaattctggctttttttacaagagtgcagaagagagagaaaaactcgtgaaagctgaaagaaaattcattgaagatagggttaaaaaaataatagaactgaaaaggaaagtctgtggcgattcagataaaggatttgttgttattaatcaaaagggaattgaccccttttccttagatgctctttcaaaagaaggcatagtcgctctgcgcagagctaaaaggagaaatatggagaggctgactcttgcttgtggtggggtagccctgaattcttttgacgacctaagtcctgactgcttgggacatgcaggacttgtatatgagtatacattgggagaagagaagtttacctttattgagaaatgtaacaaccctcgttctgtcacattattgatcaaaggaccaaataagcacacactcactcagatcaaagatgcagtgagggacggcttgagggctgtcaaaaatgctattgatgatggctgtgtggttccaggtgctggtgccgtggaagtggcaatggcagaagccctgattaaacataagcccagtgtaaagggcagggcacagcttggagtccaagcatttgctgatgcattgctcattattcccaaggttcttgctcagaactctggttttgaccttcaggaaacattagttaaaattcaagcagaacattcagaatcaggtcagcttgtgggtgtggacctgaacacaggtgagccaatggtggcagcagaagtaggcgtatgggataactattgtgtaaagaaacagcttcttcactcctgcactgtgattgccaccaacattctcttggttgatgagatcatgcgagctggaatgtcttctctgaaaggttgaattgaagcttcctctgtatctgaatcttgaagactgcaaagtgatcctgaggattacagctgtggaatttttgtccaagcttcaaataattttgaaagaaattttcccatatgaaaaaaggagagaacactggcatctgttgaaatttggaagttctgaaattatagtatttttaaaaattgcactgaagtgtatacacataaagcaggtcttttatccagtgaacaggatgttttgctttagcagcagtgacataaaattccatgttagataagcatatgttacttaccttgttattaaatatttcttgaaaagcaaattttaatggttaattttatgtggacgtatgttaaattatccaaactaccctattgttaagcatttggttttaaaatttttatgctaatataaatgctcaagtaatttaaaatattgaaagcatccctgttggtataaatttctgagtaaatgcattggatcagttggactttgaacgccctttgaaatggctttgctaaaatgctcccgccacaaagttgtaggaaatgggaagaggagtcaactagaggcaagggagttgagagagctgcaactgtaaagggcaagaacaggcagaggtaaaaagatgatggaaggtgtggtgactaagggccacggttattgggtgaaatttgagatgtaggccaactgtattttcaagcttctgaacttaaggcaaaatattcatcgcaaagtctctagcgtcatatttttctcacccaaattacgtttccacgagttattatatatagttggtctatctctgcagtccttgaaggtgaagttgtgtgttactaggctgtgttttgggatgtcagcagtggcctgaagtgagttgtgcaataaatgttaagttgaaacctcaaaaaaaa

SEQ ID NO: 105 - protein, 531 aa, Homo sapien
MAAVKTLNPKAEVARAQAALAVNISAARGLQDVLRTNLGPKGTMKMLVSGAGDIKLTKDGNVLLHEMQIQHPTASLIAKVATAQDDITGDGTTSNVLIIGELLKQADLYISEGLHPRIITEGFEAAKEKALQFLEEVKVSREMDRETLIDVARTSLRTKVHAELADVLTEAVVDSILAIKKQDEPIDLFMIEIMEMKHKSETDTSLIRGLVLDHGARHPDMKKRVEDAYILTCNVSLEYEKTEVNSGFFYKSAEEREKLVKAERKFIEDRVKKIIELKRKVCGDSDKGFVVINQKGIDPFSLDALSKEGIVALRRAKRRNMERLTLACGGVALNSFDDLSPDCLGHAGLVYEYTLGEEKFTFIEKCNNPRSVTLLIKGPNKHTLTQIKDAVRDGLRAVKNAIDDGCVVPGAGAVEVAMAEALIKHKPSVKGRAQLGVQAFADALLIIPKVLAQNSGFDLQETLVKIQAEHSESGQLVGVDLNTGEPMVAAEVGVWDNYCVKKQLLHSCTVIATNILLVDEIMRAGMSSLKG

SEQ ID NO: 106 - DNA, 4137 bp, Homo sapien
ggcacgagcggcggaggcagtgtctcccggtcgcgcgtggaggtcggtcgctcagagctgctgggcgcagtttctccgcctgctgcttcggcgcggctgtatcggcgagcgagcgagttcccgcgagttctcggtggcgctcccccttcctttcagtctccacggactggcccctcgtccttctacttgaccgctcccgtcttccgccgccttctggcgctttccgttgggccgattcccgcccgcttcctcctgcttcccatcgaagctctagaaatgaatgtttccatctcttcagagatgaaccagattatgatgcatcattatcacagaagaaattcgtgtctatagcttttaaggacttgattacatcattttcaagcctgatagttttggaatcaccattagagcttaagacacacctgccttcatttcaaccacctgtcttcataccctgacgaagtgcaccttttaacactcctttgtccttggattacttaagagttcccagaaatacatttgccaccaacagagtagccaaatttataaggaaaaatgattcccaatggatatttgatgtttgaggatgaaaattttattgagtcttctgttgccaaattaaatgccctgaggaaaagtggccagttctgtgatgttcgacttcaggtctgtggccatgaaatgttagcacacagagcagtgctagcttgctgcagtccctatttatttgaaatctttaatagtgatagtgatcctcatggaatttctcacgttaaatttgatgatctcaatccagaagctgttgaagtcttgttgaattatgcctacactgctcagttgaaagcagataaggaattggtaaaagatgtttattctgcagcaaaaaagctgaagatggatcgagtaaagcaggtttgtggtgattatttactgtctagaatggatgttaccagctgcatctcttaccgaaattttgcaagttgtatgggagactcccgtttgttgaataaggttgatgcttatattcaggagcatttgttacaaatttctgaagaggaggagtttcttaagcttccaaggctaaagttggaggtaatgcttgaagataatgtttgcttgcccagcaatggcaaattatatacaaaggtaatcaactgggtgcagcgtagcatctgggagaatggagacagtctggaagagctgatggaagaggttcaaaccttgtactactcagctgatcacaagctgcttgatgggaacctactagatggacaggctgaggtgtttggcagtgatgatgaccacattcagtttgtgcagaaaaagccaccacgtgagaatggccataagcagataagtagcagttcaactggatgtctctcttctccaaatgctacagtacaaagccctaagcatgagtggaaaatcgttgcttcagaaaagacttcaaataacacttacttgtgcctggctgtgctggatggtatattctgtgtcatttttcttcatgggagaaacagcccacagagctcaccaacaagtactccaaaactaagtaagagtttaagctttgagatgcaacaagatgagctaatcgaaaagcccatgtctcctatgcagtacgcacgatctggtctgggaacagcagagatgaatggcaaactcatagctgcaggtggctataacagagaggaatgtcttcgaacagtcgaatgctataatccacatacagatcactggtcctttcttgctcccatgagaacaccaagagcccgatttcaaatggctgtactcatgggccagctctatgtggtaggtggatcaaatggccactcagatgacctgagttgtggagagatgtatgattcaaacatagatgactggattcctgttccagaattgagaactaaccgttgtaatgcaggagtgtgtgctctgaatggaaagttatacatcgttggtggctctgatccatatggtcaaaaaggactgaaaaattgtgatgtatttgatcctgtaacaaagttgtggacaagctgtgcccctcttaacattcggagacaccagtctgcagtctgtgagcttggtggttatttgtacataatcggaggtgcagaatcttggaattgtctgaacacagtagaacgatacaatcctgaaaataatacctggactttaattgcacccatgaatgtggctaggcgaggagctggagtggctgttcttaatggaaaactgtttgtatgtggtggctttgatggttctcatgccatcagttgtgtggaaatgtatgatccaactagaaatgaatggaagatgatgggaaatatgacttcaccaaggagcaatgctgggattgcaactgtagggaacaccatttatgcagtgggaggattcgatggcaatgaatttctgaatacggtggaagtctataaccttgagtcaaatgaatggagcccctatacaaagattttccagttttaacaaatttaagaccctctcaaactaacaggcttagtgatgtaattatggttagcagaggtacacttgtgaataaagagggtgggtgggtatagatgttgctaacagcaacacaaagcttttgcatattgcatactattaaacatgctgtacatactttttgggtttatttggaaaggaatgcaaagatgaaggtctgttttgtgtacttttaagactttggttattttactttttggaaaagaataaaccaagaattgattgggcacatcatttcaagaagtcccctctcctccacatttgttttgccaatttgcacattaaatgactcttccctcaaatgtgtactatggggtaaaaggggtagggtttaaagatgtagacagttgggttttttaagggccctttttcaataactggaacactctataacaaaggatacttatttaaatagatgacattgactatttttgtttttattaaaaggaagcttacatgcctaccaatatttaatcttttatgattgcctttttataactttttatattctcagcagagtgctttaccaattgaagtaaaatgtggcaggctggagttattgaagcagagtggcagtcttcagtttgcagagtaggggtctgtcttttaaactctgagtgcaaacttcagagttcttgccttggctgcagtttttttccttcaagaatgcagtactaacatttatttgagtggagttactgaacagtaacatagctgtgatttttggtatttgaaacactggttttaaatattttgacttgttgagggtatgttttatatagcaagacattatatagcagtaaaaaatggtgttttatcttctatataattcctgtttttattattaacaaaacagtcctaaatagcagccctcaattgtgaaaaaatttactttaaactacattaggttgtgaatgcaggttttatcagaactatgtttttgttcagtttatctgttcatatggataaatattggttgggatgacttggtgtctaatgtgtagtgctacacacctaacttatggggccaaaatagcatgtcctaatgcttgctgctgatttaaacacattaaaggtactttgcaggaaatccttgcaccatgggattaatatccaattgctgcttgtacactcattcattactaaaagttttgagaaatttttttttccagtaatgagcttaagaaatttgtggaaaataactcacctggcatcttacatctgaaataaggaatgatataaggtttttttttctcacagaagatgaagcacacaggaacctaatgggccaactgggatgaggtgactattctgagatgactattcagtggctaacttgggttaggaagaaaataattaggtattttctccaaatgttcactggtactctgccactttatttctctcatctgttacacaaagaaccaccaggaaagcaaatcagtttggttggtaactctgtaattcctaactatcactggtttggttctggactaaaactacattgacagattgaatttgcctaatatgatgactgtttttaatatggatctgtatgtgttctattcagcccaaggaaataaaattttagttgaggattcaaaaaaaaaaaaaaaa

SEQ ID NO: 107 - protein, 642 aa, Homo sapien
MIPNGYLMFEDENFIESSVAKLNALRKSGQFCDVRLQVCGHEMLAHRAVLACCSPYLFEIFNSDSDPHGISHVKFDDLNPEAVEVLLNYAYTAQLKADKELVKDVYSAAKKLKMDRVKQVCGDYLLSRMDVTSCISYRNFASCMGDSRLLNKVDAYIQEHLLQISEEEEFLKLPRLKLEVMLEDNVCLPSNGKLYTKVINWVQRSIWENGDSLEELMEEVQTLYYSADHKLLDGNLLDGQAEVFGSDDDHIQFVQKKPPRENGHKQISSSSTGCLSSPNATVQSPKHEWKIVASEKTSNNTYLCLAVLDGIFCVIFLHGRNSPQSSPTSTPKLSKSLSFEMQQDELIEKPMSPMQYARSGLGTAEMNGKLIAAGGYNREECLRTVECYNPHTDHWSFLAPMRTPRARFQMAVLMGQLYVVGGSNGHSDDLSCGEMYDSNIDDWIPVPELRTNRCNAGVCALNGKLYIVGGSDPYGQKGLKNCDVFDPVTKLWTSCAPLNIRRHQSAVCELGGYLYIIGGAESWNCLNTVERYNPENNTWTLIAPMNVARRGAGVAVLNGKLFVCGGFDGSHAISCVEMYDPTRNEWKMMGNMTSPRSNAGIATVGNTIYAVGGFDGNEFLNTVEVYNLESNEWSPYTKIFQF

SEQ ID NO: 108 - DNA, 3682 bp, Homo sapien
cgagacggaagcgggctgggaggcgtcggcggcggcagcgcacgtggtgacgtgcgagggggtgcggcgcgagcggtcggcggcggcggaggcagtgtctcccggtcgcgcgtggaggtcggtcgctcagagctgctgggcgcagtttctccgcctgctgcttcggcgcggctgtatcggcgagcgagcgagttcccgcgagttctcggtggcgctcccccttcctttcagtctccacggactggcccctcgtccttctacttgaccgctcccgtcttccgccgccttctggcgctttccgttgggccgattcccgcccgcttcctcctgcttcccatcgaagctctagaaatgaatgtttccatctcttcagagatgaaccagattatgatgcatcattatcacagaagaaattcgtgtctatagcttttaaggacttgattacatcattttcaagcctgatagttttggaatcaccattagagcttaagacacacctgccttcatttcaaccacctgtcttcataccctgacgaagtgcaccttttaacactcctttgtccttggattacttaagagttcccagaaatacatttgccaccaacagagtagccaaatttataaggaaaaatgattcccaatggatatttgatgtttgaggatgaaaattttattgagtcttctgttgccaaattaaatgccctgaggaaaagtggccagttctgtgatgttcgacttcaggtctgtggccatgaaatgttagcacacagagcagtgctagcttgctgcagtccctatttatttgaaatctttaatagtgatagtgatcctcatggaatttctcacgttaaatttgatgatctcaatccagaagctgttgaagtcttgttgaattatgcctacactgctcagttgaaagcagataaggaattggtaaaagatgtttattctgcagcaaaaaagctgaagatggatcgagtaaagcaggtttgtggtgattatttactgtctagaatggatgttaccagctgcatctcttaccgaaattttgcaagttgtatgggagactcccgtttgttgaataaggttgatgcttatattcaggagcatttgttacaaatttctgaagaggaggagtttcttaagcttccaaggctaaagttggaggtaatgcttgaagataatgtttgcttgcccagcaatggcaaattatatacaaaggtaatcaactgggtgcagcgtagcatctgggagaatggagacagtctggaagagctgatggaagaggttcaaaccttgtactactcagctgatcacaagctgcttgatgggaacctactagatggacaggctgaggtgtttggcagtgatgatgaccacattcagtttgtgcagaaaaagccaccacgtgagaatggccataagcagataagtagcagttcaactggatgtctctcttctccaaatgctacagtacaaagccctaagcatgagtggaaaatcgttgcttcagaaaagacttcaaataacacttacttgtgcctggctgtgctggatggtatattctgtgtcatttttcttcatgggagaaacagcccacagagctcaccaacaagtactccaaaactaagtaagagtttaagctttgagatgcaacaagatgagctaatcgaaaagcccatgtctcctatgcagtacgcacgatctggtctgggaacagcagagatgaatggcaaactcatagctgcaggtggctataacagagaggaatgtcttcgaacagtcgaatgctataatccacatacagatcactggtcctttcttgctcccatgagaacaccaagagcccgatttcaaatggctgtactcatgggccagctctatgtggtaggtggatcaaatggccactcagatgacctgagttgtggagagatgtatgattcaaacatagatgactggattcctgttccagaattgagaactaaccgttgtaatgcaggagtgtgtgctctgaatggaaagttatacatcgttggtggctctgatccatatggtcaaaaaggactgaaaaattgtgatgtatttgatcctgtaacaaagttgtggacaagctgtgcccctcttaacattcggagacaccagtctgcagtctgtgagcttggtggttatttgtacataatcggaggtgcagaatcttggaattgtctgaacacagtagaacgatacaatcctgaaaataatacctggactttaattgcacccatgaatgtggctaggcgaggagctggagtggctgttcttaatggaaaactgtttgtatgtggtggctttgatggttctcatgccatcagttgtgtggaaatgtatgatccaactagaaatgaatggaagatgatgggaaatatgacttcaccaaggagcaatgctgggattgcaactgtagggaacaccatttatgcagtgggaggattcgatggcaatgaatttctgaatacggtggaagtctataaccttgagtcaaatgaatggagcccctatacaaagattttccagttttaacaaatttaagaccctctcaaactaacaggcttagtgatgtaattatggttagtagaggtacacttgtgaataaagagggtgggtgggtatagatgttgctaacagcaacacaaagcttttgcatattgcatactattaaacatgctgtacatactttttgggtttatttggaaaggaatgcaaagatgaaggtctgttttgtgtacttttaagactttggttattttactttttggaaaagaataaaccaagaattgattgggcacatcatttcaagaagtcccctctcctccacatttgttttgccaatttgcacattaaatgactcttccctcaaatgtgtactatggggtaaaaggggtagggtttaaagatgtagacagttgggttttttaagggccctttttcaataactggaacactctataacaaaggatacttatttaaatagatgacattgactatttttgtttttattaaaaggaagcttacatgcctaccaatatttaatcttttatgattgcctttttataactttttatattctcagcagagtgctttaccaattgaagtaaaatgtggcaggctggagttattgaagcagagtggcagtcttcagtttgcagagtaggggtctgtcttttaaactctgagtgcaaacttcagagttcttgccttggctgcagtttttttccttcaagaatgcagtactaacatttatttgagtggagttactgaacagtaacatagctgtgatttttggtatttgaaacactggttttaaatattttgacttgttgagggtatgttttatatagcaagacattatatagcagtaaaaaatggtgttttatcttctatataattcctgtttttattattaacaaaacagtcctaaatagcagccctcaattgtgaaaaaatttactttaaactacattaggttgtgaatgcaggttttatcagaactatgtttttgttcagtttatctgttcatatggataaatattggttgggatgacttggtgtctaatgtgtagtgctacacacctaacttatggggccaaaatagcatgtcctaatgcttgctgctgatttaaacacattaaaggtactttgcagg

SEQ ID NO: 109 - protein, 642 aa, Homo sapien; identical to SEQ ID NO: 107

SEQ ID NO: 110 - DNA, 2528 bp, Homo sapien
gagttccagcagtccgcgagctgccgtcggctccgcggggggggcgggccgggcaccccggggcgcggaggagcgctcctcgcttctctccttcccccctgccgcactccgccggaccctcccgccggcccgcgccgctgcactcgccctctcctctcgccccccggcaaactttcggcccctccccgcccctcgcccgttattcgtcgtggctcaagcccggccacgccgccccaagggctcctcccgacctcccggcctgccgctccggccactgcgggatccagaaacatgtcgaccacacttctgtccgccttctacgatgtcgacttcttgtgcaagacagagaaatccctggccaacctcaacctgaacaacatgctggacaagaaggcggtggggacgcctgtggccgccgcccccagctcgggcttcgcgccgggattcctccgacggcactcggccagcaacctgcatgcactcgcccaccccgcgcccagccccggcagctgctcgcccaagttcccgggcgccgctaacggcagcagctgcggcagcgcggcggccggcggtccgacctcctacggcacccttaaggagccgtcggggggcggcggcacagccctgctcaacaaggagaacaaattccgggaccgctcgtttagcgagaacggcgatcgcagccagcacctcctgcacctgcagcagcagcagaaggggggcggcggctcccagatcaactccacgcgctacaagaccgagctgtgccggcccttcgaggagagcggcacgtgcaagtacggcgaaaagtgccagttcgcgcatggcttccacgagctgcgcagcctgactcgccatccgaagtacaagaccgagctgtgccgcacctttcataccatcggcttctgcccctatgggccgcgctgccacttcatccacaacgcggacgagcggcggcccgcgccgtcggggggcgcctccggggacctgcgtgcctttggcacgcgcgatgcgttgcacctgggcttcccgcgggagccgcggcccaagttgcaccacagcctcagcttctcgggcttcccgtcgggccaccatcagcccccgggcggcctcgagtcgccgctgctgctcgacagccccacgtcgcgcacgccgccgccgccctcctgctcttcggcctcgtcctgctcctcctccgcctcctcctgttcctcggcctccgcggcctccacgccctcgggcgccccgacatgctgcgcctccgcggcggccgcggctgcggccgctctgctgtacggcaccgggggcgccgaggacctgctggcgccgggggccccgtgcgcggcctgctcgtcggcctcgtgcgccaacaacgccttcgccttcggtccggagctcagcagcctcatcacgccgctcgccatccagacccacaactttgccgccgtggccgccgccgcctactaccgcagtcagcagcagcagcagcagcagggcctggcgccccccgcgcagccgccggcgccgcccagcgcgaccctccccgccggggccgccgcacctccctcgccgcccttcagcttccagctgccgcgccgcctgtccgactcgcccgtgttcgacgcgccccccagccccccggactcgctgtcggaccgcgacagctacctaagcggctccctgagctccggcagcctcagcggctctgagtctcccagcctcgaccctggccgccgcctgccaatcttcagccgcctctccatctccgacgactgaggcaagagggcgccagtgaggaggaagggaaggcggttcagagatgttggaggacacccctcgccatctcgcccttgctgggggcacgggagtggggggggtgacatgggccctaggcagactgcaagcccgaccgagcacttggactcgaactctgtgccgggaggggcccccacccctcctttttcggtttcctcttgtctttttttttttatttttattacgaagtttcattctttttgagcaaaaaagtcgaactttttctgttgaacaaaatattcacaacagggcagttgtgatacgaatagaacaaaaaaaaaaaaaaaacacttaaactttgttaggactccgatgagtttgggacttcaggaaaaatcaacccagcaccagcagctaccaaccaccattccatctcttcacttgaacagcattagttaagtccagatgtgggaacccttctcttggaagaagttcctaattgtgtctcagaccggtgtaaacaaaccagccagccgccaccttgctaaacctataagctttttaaaatccaatatattctgccaagaatatgccttgatagttagccctcagcccataggtgttttttgttttttaacagaattatatatgtctgggggtgaaaaaacccttgcattccaaaggtccatactggttacttggtttcattgccaccacttagtggatgttcagtttagaaccattttgtctgctccctctggaagccttgcgca

SEQ ID NO: 111 - protein, 494 aa, Homo sapien
MSTTLLSAFYDVDFLCKTEKSLANLNLNNMLDKKAVGTPVAAAPSSGFAPGFLRRHSASNLHALAHPAPSPGSCSPKFPGAANGSSCGSAAAGGPTSYGTLKEPSGGGGTALLNKENKFRDRSFSENGDRSQHLLHLQQQQKGGGGSQINSTRYKTELCRPFEESGTCKYGEKCQFAHGFHELRSLTRHPKYKTELCRTFHTIGFCPYGPRCHFIHNADERRPAPSGGASGDLRAFGTRDALHLGFPREPRPKLHHSLSFSGFPSGHHQPPGGLESPLLLDSPTSRTPPPPSCSSASSCSSSASSCSSASAASTPSGAPTCCASAAAAAAAALLYGTGGAEDLLAPGAPCAACSSASCANNAFAFGPELSSLITPLAIQTHNFAAVAAAAYYRSQQQQQQQGLAPPAQPPAPPSATLPAGAAAPPSPPFSFQLPRRLSDSPVFDAPPSPPDSLSDRDSYLSGSLSSGSLSGSESPSLDPGRRLPIFSRLSISDD

SEQ ID NO: 112 - DNA, 5533 bp, Homo sapien
  Unsure 95: Unknown base
  Unsure 99: Unknown base
  Unsure 108: Unknown base
cagatttacgaggttctgttctagtgccaaaggctcttggtagtaaatagtgagcaaaatagatacctgtctcctgatggatcttgccagccccntccntattttttnttaagttatttattaaaaccacacacaccttgcaaagaaaaagggaaactggcagtctctgtagaggaagccggtggcatcgctcagagccacaaactgtatttctaaacagccctttccctggttccctctctcctgccccactttttttaaaatccagactgtaaaaaacacatctactgacactcactttactttaaaaaaagaagagaaaaagtaaagcgttacaagactttcctcctggaaactataaactgaaaaaaaaatccataaaagattaaatcctggcgggttgtggggtggcgggggccggcggggagggggcgcggagtggagattggctctctgaggtggtcaggggccctgtgacagcttgggactttcagcacctggtttggggtcatttatctgctcaactgtcaggaccccccacccccaaaccccagccaccaacacaaccatcgtagaagggaacacaacacagagggtcttttttcatttttttaaaaaatcggtttggttgtgtttttgttttccatgggggagctttaaaactcattattgcaacactagttccatttttcgccagggttccaataacacggcatcataaaggcaacgcaacccacagttctcaagacatttaccacggtcactacatccggcagcggggtggcccctagctcctgctgcccccccgccctttctccccgcccgcccccggagctcagccgatttctgaggctccaactctacccactccctccccgggccgccgccgccgcgccttcccccattcttactccctcgaggagagccacaggttgcaaatccaaccaacctcgcaatctatttttgcaaaatcactcacaaagatctccctttcgcgcccgcgcccgctcctcccgcgccgggtcccctcagccacggccacaaagtgcccttctctcctcctgagtcttgcacataaggaacgcgggctggggctctgttcgtctttctcctcgcccaaggtaaggacctcgggaatctgaagcctggcgtccactacgctcaggcccgcagttccctttttacagagcttgcaccatgggaaaaaataaaataaaatttaggaaagggaggcaacagccattgggagccaacacagagtcacgcagcgcccaaaatacaaacaccgcagcggccagaaatcccgccacctttctcgttctcccaggctgtcctgtcgaggttccctgagtccccccgcacactgaaaggcatcgcaggtgcagtgcgcacccctttcccacccaccccaagaagccctgtcccgccatcagtctctctcctcgggatgagcagggagagcgcgcggaggttcccgactccctcgactacaaccaagaaagaataattttcaaagtgttcaacatccccgcccccaagctccccaaaacacaggggcagggaacaccaaaacactcggctctcgttaggaagatcacggctctgaaaggaaatagtagacacgatacttcatctcatctggatttatgaccaaaaaaacaaaaacaaaaacccaaagagttcgcttgcattttttccttccaaatctcggttcggctcgaaggcagggaatctaaaagaccgaggccgatggaagagagccagcggggcgagcgagcgggcagcctccctttttgcctcccggagtcacccgttattcgtcgtggctcaagcccggccacgccgccccaagggctcctcccgacctcccggcctgccgctccggccactgcgggatccagaaacatgtcgaccacacttctgtccgccttctacgatgtcgacttcttgtgcaagacagagaaatccctggccaacctcaacctgaacaacatgctggacaagaaggcggtggggacgcctgtggccgccgcccccagctcgggcttcgcgccgggattcctccgacggcactcggccagcaacctgcatgcactcgcccaccccgcgcccagccccggcagctgctcgcccaagttcccgggcgccgctaacggcagcagctgcggcagcgcggcggccggcggtccgacctcctacggcacccttaaggagccgtcggggggcggcggcacagccctgctcaacaaggagaacaaattccgggaccgctcgtttagcgagaacggcgatcgcagccagcacctcctgcacctgcagcagcagcagaaggggggcggcggctcccagatcaactccacgcgctacaagaccgagctgtgccggcccttcgaggagagcggcacgtgcaagtacggcgaaaagtgccagttcgcgcatggcttccacgagctgcgcagcctgactcgccatccgaagtacaagaccgagctgtgccgcacctttcataccatcggcttctgcccctatgggccgcgctgccacttcatccacaacgcggacgagcggcggcccgcgccgtcggggggcgcctccggggacctgcgtgcctttggcacgcgcgatgcgttgcacctgggcttcccgcgggagccgcggcccaagttgcaccacagcctcagcttctcgggcttcccgtcgggccaccatcagcccccgggcggcctcgagtcgccgctgctgctcgacagccccacgtcgcgcacgccgccgccgccctcctgctcttcggcctcgtcctgctcctcctccgcctcctcctgttcctcggcctccgcggcctccacgccctcgggcgccccgacatgctgcgcctccgcggcggccgcggctgcggccgctctgctgtacggcaccgggggcgccgaggacctgctggcgccgggggccccgtgcgcggcctgctcgtcggcctcgtgcgccaacaacgccttcgccttcggtccggagctcagcagcctcatcacgccgctcgccatccagacccacaactttgccgccgtggccgccgccgcctactaccgcagtcagcagcagcagcagcagcagggcctggcgccccccgcgcagccgccggcgccgcccagcgcgaccctccccgccggggccgccgcacctccctcgccgcccttcagcttccagctgccgcgccgcctgtccgactcgcccgtgttcgacgcgccccccagccccccggactcgctgtcggaccgcgacagctacctaagcggctccctgagctccggcagcctcagcggctctgagtctcccagcctcgaccctggccgccgcctgccaatcttcagccgcctctccatctccgacgactgaggcaagagggcgccagtgaggaggaagggaaggcggttcagagatgttggaggacacccctcgccatctcgcccttgctgggggcacgggagtggggggggtgacatgggccctaggcagactgcaagcccgaccgagcacttggactcgaactctgtgccgggaggggcccccacccctcctttttcggtttcctcttgtctctttttttttatttttattacgaagtttcattctttttgagcaaaaaagtcgaactttttctgttgaacaaaatattcacaacagggcagttgtgatacgaatagaacaaaaaagaaaaaaaaaacacttaaactttgttaggactccgatgagtttgggacttcaggaaaaatcaacccagcaccagcagctaccaaccaccattccatctcttcacttgaacagcattagttaagtccagatgtgggaacccttctcttggaagaagttcctaattgtgtctcagaccggtgtaaacaaaccagccagccgccaccttgctaaacctataagctttttaaaatccaatatattctgccaagaatatgccttgatagttagccctcagcccataggtgttttttgttttttaacagaattatatatgtctgggggtgaaaaaacccttgcattccaaaggtccatactggttacttggtttcattgccaccacttagtggatgttcagtttagaaccattttgtctgctccctctggaagccttgcgcagagcttactttgtaattgttggagaataactgctgaatttttagctgttttgagttgattcgcaccactgcaccacaactcaatatgaaaactatttaacttatttattatcttgtgaaaagtatacaatgaaaattttgttcatactgtatttatcaagtatgatgaaaagcaatagatatatattcttttattatgttaaattatgattgccattattaatcggcaaaatgtggagtgtatgttcttttcacagtaatatatgccttttgtaacttcacttggttattttattgtaaatgagtacaaaattcttaatttaagagattgtatgtaatatttatttcattaatttctttccttgtttacgtaaattttgaaagattgcatgatttcttgacagaaatcgatcttgatgctgtggaagtagtttgaggaacatcctatgagttttcttagaatgtataaaggttgtagcccatccaacttcaaagaaaaaaatgaccacatactttgcaatcaggctgaaatgtggcatgcttttctaattccaactttataaactagcaaaaaagtgtttgcttattccaccagttctactgtgacatactcgagtataaagacatgtagcaataacggggagtggggggggagtctcacagtgcctttggaagggcccgaacttgccttaaatcttcctcaaccaaataagtattttattagtgcttgagagaatctgaatgtaggatgggttcaactgcacaaaaggaaaagatttttaccactttttttatatagatataaagtgaagcaaccgccttagtgctgaaatatgtagtacatgaatatgccttgtttaattacagaaaattccaaaacttgtactattttttttttccatgtagaaaggcaggaatgtctcctaagctttcctggacagcagatgaatgagcggtagctttagtttgtacgtaggtacagttggagcactatatgtactctctggactactttggacagaagtaggtttttgaatgtaacaagataagtcaacttgagttgtaatatattttggggaatcagctcactacaaattgtgactgtaaacattgtactgtaaatgttttgtagttttcccccaataaaatttttgggaaaaaaaggtattaacatgtaagagctttctttttaaacaggaatgtcttagctttctagcttcccagctaaccatgtctgccattccccaggtcttggcatggtgggggaggacttggagagctggcagagccagagttcagaagagcctgcgtcctctcagcccgtatatattttataagcaagttcttctaatgaaagaaagtaattatttggactgtcaagggcattagtt

SEQ ID NO: 113 - protein, 546 aa, Homo sapien
MEESQRGERAGSLPFCLPESPVIRRGSSPATPPQGLLPTSRPAAPATAGSRNMSTTLLSAFYDVDFLCKTEKSLANLNLNNMLDKKAVGTPVAAAPSSGFAPGFLRRHSASNLHALAHPAPSPGSCSPKFPGAANGSSCGSAAAGGPTSYGTLKEPSGGGGTALLNKENKFRDRSFSENGDRSQHLLHLQQQQKGGGGSQINSTRYKTELCRPFEESGTCKYGEKCQFAHGFHELRSLTRHPKYKTELCRTFHTIGFCPYGPRCHFIHNADERRPAPSGGASGDLRAFGTRDALHLGFPREPRPKLHHSLSFSGFPSGHHQPPGGLESPLLLDSPTSRTPPPPSCSSASSCSSSASSCSSASAASTPSGAPTCCASAAAAAAAALLYGTGGAEDLLAPGAPCAACSSASCANNAFAFGPELSSLITPLAIQTHNFAAVAAAAYYRSQQQQQQQGLAPPAQPPAPPSATLPAGAAAPPSPPFSFQLPRRLSDSPVFDAPPSPPDSLSDRDSYLSGSLSSGSLSGSESPSLDPGRRLPIFSRLSISDD

SEQ ID NO: 114 - DNA, 2528 bp, Homo sapien; identical to SEQ ID NO: 110

SEQ ID NO: 115 - protein, 494 aa, Homo sapien; identical to SEQ ID NO: 111

SEQ ID NO: 116 - DNA, 1674 bp, Homo sapien
  Unsure 515: Unknown base
  Unsure 521-553: Unknown base
aaaagaaaaaaaaaagatttttttcttctcttaatcggaatcgtgatggtgttggattatttcaatggtggggttaatatagcatgttatcctgtctatcttttaaagatttctgtataagactgttgagcagtttttaaaatagtgtaggataatataaaaagcagatagatggcgctatgtttgattcctacaacgaaattatcaccagctttttttcattcttaactctttaaaggattcaaacgcaactcaaatctgtgctggactttaaaaaaacaattcaggaccaaattttttctcagtgtgtgtgtttattccttataggtgtaaatgagaagacgtgtttttttccttcaccgatgctccatcctcgtatttctttttccttgtaaatgtaatcagatgccattttatatgtggacgtatttatactggccaaacatattttttcttttgtccctttttttctttcctttctttttacttcctttatttcttattcctcctttccntttttnnnnnnnnnnnnnnnnnnnnnnnnnnnnnnnnnggtagttgttgttacccacgccattttacgtctccttcactgaagggctagagttttaacttttaattttttatatttaaatgtagacttttgacacttttaaaaaacaaaaaaagacaagagagatgaaaacgtttgattattttctcagtgtatttttgtaaaaaatatataaagggggtgttaatcggtgtaaatcgctgtttggatttcctgattttataacagggcggctggttaatatctcacacagtttaaaaaatcagcccctaatttctccatgtttacacttcaatctgcaggcttcttaaagtgacagtatcccttaacctgccaccagtgtccaccctccggcccccgtcttgtaaaaaggggaggagaattagccaaacactgtaagcttttaagaaaaacaaagttttaaacgaaatactgctctgtccagaggctttaaaactggtgcaattacagcaaaaagggattctgtagctttaacttgtaaaccacatcttttttgcactttttttataagcaaaaacgtgccgtttaaaccactggatctatctaaatgccgatttgagttcgcgacactatgtactgcgtttttcattcttgtatttgactatttaatcctttctacttgtcgctaaatataattgttttagtcttatggcatgatgatagcatatgtgttcaggtttatagctgttgtgtttaaaaattgaaaaaagtggaaaacatctttgtacatttaagtctgtattataataagcaaaaagattgtgtgtatgtatgtttaatataacatgacaggcactaggacgtctgcctttttaaggcagttccgttaagggtttttgtttttaaacttttttttgccatccatcctgtgcaatatgccgtgtagaatatttgtcttaaaattcaaggccacaaaaacaatgtttgggggaaaaaaaagaaaaaatcatgccagctaatcatgtcaagttcactgcctgtcagattgttgatatataccttctgtaaataactttttttgagaaggaaataaaatcagctggaactgaaccctaaaaaaaatctatgtcgggtgcggagaaagaggtaatgaaatggca

SEQ ID NO: 117 - protein, 74 aa, Homo sapien
  unsure 61: unknown amino acid
  unsure 63: unknown amino acid
  unsure 64: unknown amino acid
  unsure 65: unknown amino acid
  unsure 66: unknown amino acid
  unsure 67: unknown amino acid
  unsure 68: unknown amino acid
  unsure 69: unknown amino acid
  unsure 70: unknown amino acid
  unsure 71: unknown amino acid
  unsure 72: unknown amino acid
  unsure 73: unknown amino acid
  unsure 74: unknown amino acid
MRRRVFFLHRCSILVFLFPCKCNQMPFYMWTYLYWPNIFFLLSLFFFPFFLLPLFLIPPFXFXXXXXXXXXXXX

SEQ ID NO: 118 - DNA, 1851 bp, Homo sapien
gggcgcgccagagacgcagccgcgctcccaccacccacacccaccgcgccctcgttcgcctcttctccgggagccagtccgcgccaccgccgccgcccaggccatcgccaccctccgcagccatgtccaccaggtccgtgtcctcgtcctcctaccgcaggatgttcggcggcccgggcaccgcgagccggccgagctccagccggagctacgtgactacgtccacccgcacctacagcctgggcagcgcgctgcgccccagcaccagccgcagcctctacgcctcgtccccgggcggcgtgtatgccacgcgctcctctgccgtgcgcctgcggagcagcgtgcccggggtgcggctcctgcaggactcggtggacttctcgctggccgacgccatcaacaccgagttcaagaacacccgcaccaacgagaaggtggagctgcaggagctgaatgaccgcttcgccaactacatcgacaaggtgcgcttcctggagcagcagaataagatcctgctggccgagctcgagcagctcaagggccaaggcaagtcgcgcctaggggacctctacgaggaggagatgcgggagctgcgccggcaggtggaccagctaaccaacgacaaagcccgcgtcgaggtggagcgcgacaacctggccgaggacatcatgcgcctccgggagaaattgcaggaggagatgcttcagagagaggaagccgaaaacaccctgcaatctttcagacaggatgttgacaatgcgtctctggcacgtcttgaccttgaacgcaaagtggaatctttgcaagaagagattgcctttttgaagaaactccacgaagaggaaatccaggagctgcaggctcagattcaggaacagcatgtccaaatcgatgtggatgtttccaagcctgacctcacggctgccctgcgtgacgtacgtcagcaatatgaaagtgtggctgccaagaacctgcaggaggcagaagaatggtacaaatccaagtttgctgacctctctgaggctgccaaccggaacaatgacgccctgcgccaggcaaagcaggagtccactgagtaccggagacaggtgcagtccctcacctgtgaagtggatgcccttaaaggaaccaatgagtccctggaacgccagatgcgtgaaatggaagagaactttgccgttgaagctgctaactaccaagacactattggccgcctgcaggatgagattcagaatatgaaggaggaaatggctcgtcaccttcgtgaataccaagacctgctcaatgttaagatggcccttgacattgagattgccacctacaggaagctgctggaaggcgaggagagcaggatttctctgcctcttccaaacttttcctccctgaacctgagggaaactaatctggattcactccctctggttgatacccactcaaaaaggacattcctgattaagacggttgaaactagagatggacaggttatcaacgaaacttctcagcatcacgatgaccttgaataaaaattgcacacactcagtggcaggcgatatattacccaggcaagaataaaaaagaaatcccatatcttaaagaaacagctttcaagtgcctttctgcagtttttcaggagcgcaagatagatttggaataggaataagctctagttcttaacaaccgacactcctacaagatttagaaaaaagtttacaacataatctagtttacagaaaaatcttgtgctagaatactttttaaaaggtattttgaataccattaaaactgcttttttttttccagcaagtatccaaccaacttggttctgcttcaataaatctttggaaaactcca

SEQ ID NO: 119 - protein, 466 aa, Homo sapien
MSTRSVSSSSYRRMFGGPGTASRPSSSRSYVTTSTRTYSLGSALRPSTSRSLYASSPGGVYATRSSAVRLRSSVPGVRLLQDSVDFSLADAINTEFKNTRTNEKVELQELNDRFANYIDKVRFLEQQNKILLAELEQLKGQGKSRLGDLYEEEMRELRRQVDQLTNDKARVEVERDNLAEDIMRLREKLQEEMLQREEAENTLQSFRQDVDNASLARLDLERKVESLQEEIAFLKKLHEEEIQELQAQIQEQHVQIDVDVSKPDLTAALRDVRQQYESVAAKNLQEAEEWYKSKFADLSEAANRNNDALRQAKQESTEYRRQVQSLTCEVDALKGTNESLERQMREMEENFAVEAANYQDTIGRLQDEIQNMKEEMARHLREYQDLLNVKMALDIEIATYRKLLEGEESRISLPLPNFSSLNLRETNLDSLPLVDTHSKRTFLIKTVETRDGQVINETSQHHDDLE

SEQ ID NO: 120 - DNA, 2279 bp, Homo sapien
tgcctgctgagggtggagacccacgagccgaggcctcctgcagtgttctgcacagcaaaccgcacgctatggctgacagccgggatcccgccagcgaccagatgcagcactggaaggagcagcgggccgcgcagaaagctgatgtcctgaccactggagctggtaacccagtaggagacaaacttaatgttattacagtagggccccgtgggccccttcttgttcaggatgtggttttcactgatgaaatggctcattttgaccgagagagaattcctgagagagttgtgcatgctaaaggagcaggggcctttggctactttgaggtcacacatgacattaccaaatactccaaggcaaaggtatttgagcatattggaaagaagactcccatcgcagttcggttctccactgttgctggagaatcgggttcagctgacacagttcgggaccctcgtgggtttgcagtgaaattttacacagaagatggtaactgggatctcgttggaaataacacccccattttcttcatcagggatcccatattgtttccatcttttatccacagccaaaagagaaatcctcagacacatctgaaggatccggacatggtctgggacttctggagcctacgtcctgagtctctgcatcaggtttctttcttgttcagtgatcgggggattccagatggacatcgccacatgaatggatatggatcacatactttcaagctggttaatgcaaatggggaggcagtttattgcaaattccattataagactgaccagggcatcaaaaacctttctgttgaagatgcggcgagactttcccaggaagatcctgactatggcatccgggatctttttaacgccattgccacaggaaagtacccctcctggactttttacatccaggtcatgacatttaatcaggcagaaacttttccatttaatccattcgatctcaccaaggtttggcctcacaaggactaccctctcatcccagttggtaaactggtcttaaaccggaatccagttaattactttgctgaggttgaacagatagccttcgacccaagcaacatgccacctggcattgaggccagtcctgacaaaatgcttcagggccgcctttttgcctatcctgacactcaccgccatcgcctgggacccaattatcttcatatacctgtgaactgtccctaccgtgctcgagtggccaactaccagcgtgatggcccgatgtgcatgcaggacaatcagggtggtgctccaaattactaccccaacagctttggtgctccggaacaacagccttctgccctggagcacagcatccaatattctggagaagtgcggagattcaacactgccaatgatgataacgttactcaggtgcgggcattctatgtgaacgtgctgaatgaggaacagaggaaacgtctgtgtgagaacattgccggccacctgaaggatgcacaaattttcatccagaagaaagcggtcaagaacttcactgaggtccaccctgactacgggagccacatccaggctcttctggacaagtacaatgctgagaagcctaagaatgcgattcacacctttgtgcagtccggatctcacttggcggcaagggagaaggcaaatctgtgaggccggggccctgcacctgtgcagcgaagcttagcgttcatccgtgtaacccgctcatcactggatgaagattctcctgtgctagatgtgcaaatgcaagctagtggcttcaaaatagagaatcccactttctatagcagattgtgtaacaattttaatgctatttccccaggggaaaatgaaggttaggatttaacagtcatttaaaaaaaaaatttgttttgacggatgattggattattcatttaaaatgattagaaggcaagtttctagctagaaatatgattttatttgacaaaatttgttgaaattatgtatgtttacatatcacctcatggcctattatattaaaatatggctataaatatataaaaagaaaagataaagatgatctactcagaaatttttatttttctaaggttctcataggaaaagtacatttaatacagcagtgtcatcagaagataacttgagcaccgtcatggcttaatgtttattcctgataataattgatcaaattcatttttttcactggagttacattaatgttaattcagcactgatttcacaacagatcaatttgtaattgcttacatttttacaataaataatctgtacgtaagaaca

SEQ ID NO: 121 - protein, 527 aa, Homo sapien
MADSRDPASDQMQHWKEQRAAQKADVLTTGAGNPVGDKLNVITVGPRGPLLVQDVVFTDEMAHFDRERIPERVVHAKGAGAFGYFEVTHDITKYSKAKVFEHIGKKTPIAVRFSTVAGESGSADTVRDPRGFAVKFYTEDGNWDLVGNNTPIFFIRDPILFPSFIHSQKRNPQTHLKDPDMVWDFWSLRPESLHQVSFLFSDRGIPDGHRHMNGYGSHTFKLVNANGEAVYCKFHYKTDQGIKNLSVEDAARLSQEDPDYGIRDLFNAIATGKYPSWTFYIQVMTFNQAETFPFNPFDLTKVWPHKDYPLIPVGKLVLNRNPVNYFAEVEQIAFDPSNMPPGIEASPDKMLQGRLFAYPDTHRHRLGPNYLHIPVNCPYRARVANYQRDGPMCMQDNQGGAPNYYPNSFGAPEQQPSALEHSIQYSGEVRRFNTANDDNVTQVRAFYVNVLNEEQRKRLCENIAGHLKDAQIFIQKKAVKNFTEVHPDYGSHIQALLDKYNAEKPKNAIHTFVQSGSHLAAREKANL

SEQ ID NO: 122 - DNA, 2795 bp, Homo sapien
atcagcgagggattcacggcgaaatgagactgttcgtgagtgatggcgtcccgggttgcttgccggtgctggccgccgccgggagagcccggggcagagcagaggtgctcatcagcactgtaggcccggaagattgtgtggtcccgttcctgacccggcctaaggtccctgtcttgcagctggatagcggcaactacctcttctccactagtgcaatctgccgatatttttttttgttatctggctgggagcaagatgacctcactaaccagtggctggaatgggaagcgacagagctgcagccagctttgtctgctgccctgtactatttagtggtccaaggcaagaagggggaagatgttcttggttcagtgcggagagccctgactcacattgaccacagcttgagtcgtcagaactgtcctttcctggctggggagacagaatctctagccgacattgttttgtggggagccctatacccattactgcaagatcccgcctacctccctgaggagctgagtgccctgcacagctggttccagacactgagtacccaggaaccatgtcagcgagctgcagagactgtactgaaacagcaaggtgtcctggctctccggccttacctccaaaagcagccccagcccagccccgctgagggaagggctgtcaccaatgagcctgaggaggaggagctggctaccctatctgaggaggagattgctatggctgttactgcttgggagaagggcctagaaagtttgcccccgctgcggccccagcagaatccagtgttgcctgtggctggagaaaggaatgtgctcatcaccagtgccctcccttacgtcaacaatgtcccccaccttgggaacatcattggttgtgtgctcagtgccgatgtctttgccaggtactctcgcctccgccagtggaacaccctctatctgtgtgggacagatgagtatggtacagcaacagagaccaaggctctggaggagggactaaccccccaggagatctgcgacaagtaccacatcatccatgctgacatctaccgctggtttaacatttcgtttgatatttttggtcgcaccaccactccacagcagaccaaaatcacccaggacattttccagcagttgctgaaacgaggttttgtgctgcaagatactgtggagcaactgcgatgtgagcactgtgctcgcttcctggctgaccgcttcgtggagggcgtgtgtcccttctgtggctatgaggaggctcggggtgaccagtgtgacaagtgtggcaagctcatcaatgctgtcgagcttaagaagcctcagtgtaaagtctgccgatcatgccctgtggtgcagtcgagccagcacctgtttctggacctgcctaagctggagaagcgactggaggagtggttggggaggacattgcctggcagtgactggacacccaatgcccagtttatcacccgttcttggcttcgggatggcctcaagccacgctgcataacccgagacctcaaatggggaacccctgtacccttagaaggttttgaagacaaggtattctatgtctggtttgatgccactattggctatctgtccatcacagccaactacacagaccagtgggagagatggtggaagaacccagagcaagtggacctgtatcagttcatggccaaagacaatgttcctttccatagcttagtctttccttgctcagccctaggagctgaggataactataccttggtcagccacctcattgctacagagtacctgaactatgaggatgggaaattctctaagagccgcggtgtgggagtgtttggggacatggcccaggacacggggatccctgctgacatctggcgcttctatctgctgtacattcggcctgagggccaggacagtgctttctcctggacggacctgctgctgaagaataattctgagctgcttaacaacctgggcaacttcatcaacagagctgggatgtttgtgtctaagttctttgggggctatgtgcctgagatggtgctcacccctgatgatcagcgcctgctggcccatgtcaccctggagctccagcactatcaccagctacttgagaaggttcggatccgggatgccttgcgcagtatcctcaccatatctcgacatggcaaccaatatattcaggtgaatgagccctggaagcggattaaaggcagtgaggctgacaggcaacgggcaggaacagtgactggcttggcagtgaatatagctgccttgctctctgtcatgcttcagccttacatgcccacggttagtgccacaatccaggcccagctgcagctcccacctccagcctgcagtatcctgctgacaaacttcctgtgtaccttaccagcaggacaccagattggcacagtcagtcccttgttccaaaaattggaaaatgaccagattgaaagtttaaggcagcgctttggagggggccaggcaaaaacgtccccgaagccagcagttgtagagactgttacaacagccaagccacagcagatacaagcgctgatggatgaagtgacaaaacaaggaaacattgtccgagaactgaaagcacaaaaggcagacaagaacgaggttgctgcggaggtggcgaaactcttggatctaaagaaacagttggctgtagctgaggggaaaccccctgaagcccctaaaggcaagaagaaaaagtaaaagaccttggctcatagaaagtcactttaatagatagggacagtaataaataaatgtacaatctctata

SEQ ID NO: 123 - protein, 900 aa, Homo sapien
MRLFVSDGVPGCLPVLAAAGRARGRAEVLISTVGPEDCVVPFLTRPKVPVLQLDSGNYLFSTSAICRYFFLLSGWEQDDLTNQWLEWEATELQPALSAALYYLVVQGKKGEDVLGSVRRALTHIDHSLSRQNCPFLAGETESLADIVLWGALYPLLQDPAYLPEELSALHSWFQTLSTQEPCQRAAETVLKQQGVLALRPYLQKQPQPSPAEGRAVTNEPEEEELATLSEEEIAMAVTAWEKGLESLPPLRPQQNPVLPVAGERNVLITSALPYVNNVPHLGNIIGCVLSADVFARYSRLRQWNTLYLCGTDEYGTATETKALEEGLTPQEICDKYHIIHADIYRWFNISFDIFGRTTTPQQTKITQDIFQQLLKRGFVLQDTVEQLRCEHCARFLADRFVEGVCPFCGYEEARGDQCDKCGKLINAVELKKPQCKVCRSCPVVQSSQHLFLDLPKLEKRLEEWLGRTLPGSDWTPNAQFITRSWLRDGLKPRCITRDLKWGTPVPLEGFEDKVFYVWFDATIGYLSITANYTDQWERWWKNPEQVDLYQFMAKDNVPFHSLVFPCSALGAEDNYTLVSHLIATEYLNYEDGKFSKSRGVGVFGDMAQDTGIPADIWRFYLLYIRPEGQDSAFSWTDLLLKNNSELLNNLGNFINRAGMFVSKFFGGYVPEMVLTPDDQRLLAHVTLELQHYHQLLEKVRIRDALRSILTISRHGNQYIQVNEPWKRIKGSEADRQRAGTVTGLAVNIAALLSVMLQPYMPTVSATIQAQLQLPPPACSILLTNFLCTLPAGHQIGTVSPLFQKLENDQIESLRQRFGGGQAKTSPKPAVVETVTTAKPQQIQALMDEVTKQGNIVRELKAQKADKNEVAAEVAKLLDLKKQLAVAEGKPPEAPKGKKKK

SEQ ID NO: 124 - DNA, 3117 bp, Homo sapien
attcgaaccccgtcgcgcccctttgtgcgtcacgggtggcgggcgcgggaaggggatttggattgttgcgcctctgctctgaagaaagtgctgtctggctccaactccagttctttcccctgagcagcgcctggaacctaacccttcccactctgtcaccttctcgatcccgccggcgctttagagccgcagtccagtcttggatccttcagagcctcagccactagctgcgatgcatgtgatcaagcgagatggccgccaagaacgagtcatgtttgacaaaattacatctcgaatccagaagctttgttatggactcaatatggattttgttgatcctgctcagatcaccatgaaagtaatccaaggcttgtacagtggggtcaccacagtggaactagatactttggctgctgaaacagctgcaaccttgactactaagcaccctgactatgctatcctggcagccaggatcgctgtctctaacttgcacaaagaaacaaagaaagtgttcagtgatgtgatggaagacctctataactacataaatccacataatggcaaacactctcccatggtggccaagtcaacattggatattgttctggccaataaagatcgcctgaattctgctattatctatgaccgagatttctcttacaattacttcggctttaagacgctagagcggtcttatttgttgaagatcaatggaaaagtggctgaaagaccacaacatatgttgatgagagtatctgttgggatccacaaagaagacattgatgcagcaattgaaacatataatcttctttctgagaggtggtttactcatgcttcgcccactctcttcaatgctggtaccaaccgcccacaactttctagctgttttcttctgagtatgaaagatgacagcattgaaggcatttatgacactctaaagcaatgtgcattgatttctaagtctgctggaggaattggtgttgctgtgagttgtattcgggctactggcagctacattgctgggactaatggcaattccaatggccttgtaccgatgctgagagtatataacaacacagctagatatgtggatcaaggtgggaacaagcgtcctggggcatttgctatttacctggagccttggcatttagacatctttgaattccttgatttaaagaagaacacaggaaaggaagagcagcgtgccagagatcttttctttgctctttggattccggatctcttcatgaaacgagtggagactaatcaggactggtctttgatgtgtccaaatgagtgtcctggtctggatgaggtttggggagaggaatttgagaaactatatgcaagttatgagaaacaaggtcgtgtccgcaaagttgtaaaagctcagcagctttggtatgccatcattgagtctcagacggaaacaggcaccccgtatatgctctacaaagattcctgtaatcgaaagagcaaccagcagaacctgggaaccatcaaatgcagcaacctgtgcacagaaatagtggagtacaccagcaaagatgaggttgctgtttgtaatttggcttccctggccctgaatatgtatgtcacatcagaacacacatacgactttaagaagttggctgaagtcactaaagtcgttgtccgaaacttgaataaaattattgatataaactactatcctgtaccagaggcatgcctatcaaataaacgccatcgccccattggaattggggtacaaggtctggcagatgcttttatcctgatgagatacccttttgagagtgcagaagcccagttactgaataagcagatctttgaaactatttattatggtgctctggaagccagctgtgaccttgccaaggagcagggcccatacgaaacctatgagggctctccagttagcaaaggaattcttcagtatgatatgtggaatgttactcctacagacctatgggactggaaggttctcaaggagaagattgcaaagtatggtataagaaacagtttacttattgccccgatgcctacagcttccactgctcagatcctggggaataatgagtccattgaaccttacaccagcaacatctatactcgcagagtcttgtcaggagaatttcagattgtaaatcctcacttattgaaagatcttaccgagcggggcctatggcatgaagagatgaaaaaccagattattgcatgcaatggctctattcagagcataccagaaattcctgatgacctgaagcaactttataaaactgtgtgggaaatctctcagaaaactgttctcaagatggcagctgagagaggtgctttcattgatcaaagccaatctttgaacatccacattgctgagcctaactatggcaaactcactagtatgcacttctacggctggaagcagggtttgaagactgggatgtattatttaaggacaagaccagcagctaatccaatccagttcactctaaataaggagaagctaaaagataaagaaaaggtatcaaaagaggaagaagagaaggagaggaacacagcagccatggtgtgctctttggagaatagagatgaatgtctgatgtgtggatcctgaggaaagacttggaagagaccagcatgtcttcagtagccaaactacttcttgagcatagataggtatagtgggtttgcttgaggtggtaaggctttgctggaccctgttgcaggcaaaaggagtaattgatttaaagtactgttaatgatgttaatgatttttttttaaactcatatattgggattttcaccaaaataatgcttttgaaaaaaagaaaaaaaaaacggatatattgagaatcaaagtagaagttttaggaatgcaaaataagtcatcttgcatacagggagtggttaagtaaggtttcatcacccatttagcatgcttttctgaagacttcagttttgttaaggagatttagttttactgctttgactggtgggtctctagaagcaaaactgagtgataactcatgagaagtactgataggacctttatctggatatggtcctataggttattctgaaataaagataaacatttctaagtgaaaaaaaaaaaaaaaa

SEQ ID NO: 125 - protein, 792 aa, Homo sapien
MHVIKRDGRQERVMFDKITSRIQKLCYGLNMDFVDPAQITMKVIQGLYSGVTTVELDTLAAETAATLTTKHPDYAILAARIAVSNLHKETKKVFSDVMEDLYNYINPHNGKHSPMVAKSTLDIVLANKDRLNSAIIYDRDFSYNYFGFKTLERSYLLKINGKVAERPQHMLMRVSVGIHKEDIDAAIETYNLLSERWFTHASPTLFNAGTNRPQLSSCFLLSMKDDSIEGIYDTLKQCALISKSAGGIGVAVSCIRATGSYIAGTNGNSNGLVPMLRVYNNTARYVDQGGNKRPGAFAIYLEPWHLDIFEFLDLKKNTGKEEQRARDLFFALWIPDLFMKRVETNQDWSLMCPNECPGLDEVWGEEFEKLYASYEKQGRVRKVVKAQQLWYAIIESQTETGTPYMLYKDSCNRKSNQQNLGTIKCSNLCTEIVEYTSKDEVAVCNLASLALNMYVTSEHTYDFKKLAEVTKVVVRNLNKIIDINYYPVPEACLSNKRHRPIGIGVQGLADAFILMRYPFESAEAQLLNKQIFETIYYGALEASCDLAKEQGPYETYEGSPVSKGILQYDMWNVTPTDLWDWKVLKEKIAKYGIRNSLLIAPMPTASTAQILGNNESIEPYTSNIYTRRVLSGEFQIVNPHLLKDLTERGLWHEEMKNQIIACNGSIQSIPEIPDDLKQLYKTVWEISQKTVLKMAAERGAFIDQSQSLNIHIAEPNYGKLTSMHFYGWKQGLKTGMYYLRTRPAANPIQFTLNKEKLKDKEKVSKEEEEKERNTAAMVCSLENRDECLMCGS

SEQ ID NO: 126 - DNA, 1591 bp, Homo sapien
tctgggcgcgcgcgacgtcagtttgagttctgtgttctccccgcccgtgtcccgcccgacccgcgcccgcgatgctggcgctgcgctgcggctcccgctggctcggcctgctctccgtcccgcgctccgtgccgctgcgcctccccgcggcccgcgcctgcagcaagggctccggcgacccgtcctcttcctcctcctccgggaacccgctcgtgtacctggacgtggacgccaacgggaagccgctcggccgcgtggtgctggagctgaaggcagatgtcgtcccaaagacagctgagaacttcagagccctgtgcactggtgagaagggcttcggctacaaaggctccaccttccacagggtgatcccttccttcatgtgccaggcgggcgacttcaccaaccacaatggcacaggcgggaagtccatctacggaagccgctttcctgacgagaactttacactgaagcacgtggggccaggtgtcctgtccatggctaatgctggtcctaacaccaacggctcccagttcttcatctgcaccataaagacagactggttggatggcaagcatgttgtgttcggtcacgtcaaagagggcatggacgtcgtgaagaaaatagaatctttcggctctaagagtgggaggacatccaagaagattgtcatcacagactgtggccagttgagctaatctgtggccagggtgctggcatggtggcagctgcaaatgtccatgcacccaggtggccgcgttgggctgtcagccaaggtgcctgaaacgatacgtgtgcccactccactgtcacagtgtgcctgaggaaggctgctagggatgttagacctcggccaggacccaccacattgcttcctaatacccacccttcctcacgacctcatttctgggcatctttgtggacatgatgtcacccaccccttgtcaagcattgcctgtgattgcccagcccagattcatctgtgccttggacatggtgatggtgatgggttgccatccaagtgaaagtcttttccttgaccaagggggacagtcagttttgcaaaaggactctaatacctgtttaatattgtcttcctaattgggataatttaattaacaagattgactagaagtgaaactgcaacactaacttccccgtgctgtggtgtgacctgagttggtgacacaggccacagaccccagagcttggcttttgaaacacaactcagggcttttgtgaaggttcccccgctgagatctttcctcctggttactgtgaagcctgttggtttgctgctgtcgtttttgaggagggcccatgggggtaggagcagttgaacctgggaacaaacctcacttgagctgtgcctagacaatgtgaattcctgtgttgctaacagaagtggcctgtaagctcctgtgctccggagggaagcatttcctggtaggctttgatttttctgtgtgttaaagaaattcaatctactcatgatgtgttatgcataaaacatttctggaacatggatttgtgttcaccttaaatgtgaaaataaatcctattttctatggaaaaaaaaaaaaaaaaaaaaaaa

SEQ ID NO: 127 - protein, 207 aa, Homo sapien
MLALRCGSRWLGLLSVPRSVPLRLPAARACSKGSGDPSSSSSSGNPLVYLDVDANGKPLGRVVLELKADVVPKTAENFRALCTGEKGFGYKGSTFHRVIPSFMCQAGDFTNHNGTGGKSIYGSRFPDENFTLKHVGPGVLSMANAGPNTNGSQFFICTIKTDWLDGKHVVFGHVKEGMDVVKKIESFGSKSGRTSKKIVITDCGQLS

SEQ ID NO: 128 - DNA, 1591 bp, Homo sapien; identical to SEQ ID NO: 126

SEQ ID NO: 129 - protein, 207 aa, Homo sapien; identical to SEQ ID NO: 127

SEQ ID NO: 130 - DNA, 1238 bp, Homo sapien
cggcggagctggtcccgttgtgctgcggcgccgcgcggcctgcagtcccgggcccgcgccccgcgccgcccgcccgcccgccatggagcccggccccgacggccccgccgcctccggccccgccgccatccgcgagggctggttccgcgagacctgcagcctgtggcccggccaggccctgtcgctgcaggtggagcagctgctccaccaccggcgctcgcgctaccaggacatcctcgtcttccgcagtaagacctatggcaacgtgctggtgttggacggtgtcatccagtgcacggagagagacgagttctcctaccaggagatgatcgccaacctgcctctctgcagccaccccaacccgcgaaaggtgctgatcatcgggggcggagatggaggtgtcctgcgggaggtggtgaagcacccctccgtggagtccgtggtccagtgtgagatcgacgaggatgtcatccaagtctccaagaagttcctgccaggcatggccattggctactctagctcgaaggtgaccctacatgtgggtgacggttttgagttcatgaaacagaatcaggatgccttcgacgtgatcatcactgactcctcagaccccatgggccccgccgaaagtctcttcaaggagtcctattaccagctcatgaagacagccctcaaggaagatggtgtcctctgctgccagggcgagtgcgagtggctgcacctggacctcatcaaggagatgcggcagttctgccagtccctgttccccgtggtggcctatgcctactgcaccatccccacctaccccagcggccagatcggcttcatgctgtgcagcaagaacccgagcacgaacttccaggagccggtgcagccgctgacacagcagcaggtggcgcagatgcagctgaagtactacaactccgacgtgcaccgcgccgcctttgtgctgcccgagtttgcccgcaaggccctgaatgatgtgagctgagcccaggcgccaccactgatgccacccaggacctcggaccttggagcctgcggggtgcctcggcccctccagccccgggccggacctcctgctggctctcgcccaccaaccaagtgttacaagccccagaatgctgcccggcctgccctgctgggcggactgtctgtgtgtctgtctctctggcgttccacctccaagcctataccagctgtgtacagcgccatctctctgccttctgttgcccccg

SEQ ID NO: 131 - protein, 302 aa, Homo sapien
MEPGPDGPAASGPAAIREGWFRETCSLWPGQALSLQVEQLLHHRRSRYQDILVFRSKTYGNVLVLDGVIQCTERDEFSYQEMIANLPLCSHPNPRKVLIIGGGDGGVLREVVKHPSVESVVQCEIDEDVIQVSKKFLPGMAIGYSSSKVTLHVGDGFEFMKQNQDAFDVIITDSSDPMGPAESLFKESYYQLMKTALKEDGVLCCQGECEWLHLDLIKEMRQFCQSLFPVVAYAYCTIPTYPSGQIGFMLCSKNPSTNFQEPVQPLTQQQVAQMQLKYYNSDVHRAAFVLPEFARKALNDVS

SEQ ID NO: 132 - DNA, 949 bp, Homo sapien
gcgctccgggcctggaatccctacgcgtccctttgggtttagcacgatgagctcaatcggcactgggtatgacctgtcagcctctacattctctcctgacggaagagtttttcaagttgaatatgctatgaaggctgtggaaaatagtagtacagctattggaatcagatgcaaagatggtgttgtctttggggtagaaaaattagtcctttctaaactttatgaagaaggttccaacaaaagactttttaatgttgatcggcatgttggaatggcagtagcaggtttgttggcagatgctcgttctttagcagacatagcaagagaagaagcttccaacttcagatctaactttggctacaacattccactaaaacatcttgcagacagagtggccatgtatgtgcatgcatatacactctacagtgctgttagaccttttggctgcagtttcatgttagggtcttacagtgtgaatgacggtgcgcaactctacatgattgacccatcaggtgtttcatacggttattggggctgtgccatcggcaaagccaggcaagctgcaaagacggaaatagagaagcttcagatgaaagaaatgacctgccgtgatatcgttaaagaagttgcaaaaataatttacatagtacatgacgaagttaaggataaagcttttgaactagaactcagctgggttggtgaattaactaatggaagacatgaaattgttccaaaagatataagagaagaagcagagaaatatgctaaggaatctctgaaggaagaagatgaatcagatgatgataatatgtaacatttactccagcatctattgtattttaaatttctactccagtccaatgtaactatttagccctggattatacatactgtccaattttcattaaatttttgtcttataactataaaaaaaaaaaaaaaaaaaaaa

SEQ ID NO: 133 - protein, 255 aa, Homo sapien
MSSIGTGYDLSASTFSPDGRVFQVEYAMKAVENSSTAIGIRCKDGVVFGVEKLVLSKLYEEGSNKRLFNVDRHVGMAVAGLLADARSLADIAREEASNFRSNFGYNIPLKHLADRVAMYVHAYTLYSAVRPFGCSFMLGSYSVNDGAQLYMIDPSGVSYGYWGCAIGKARQAAKTEIEKLQMKEMTCRDIVKEVAKIIYIVHDEVKDKAFELELSWVGELTNGRHEIVPKDIREEAEKYAKESLKEEDESDDDNM

SEQ ID NO: 134 - DNA, 3061 bp, Homo sapien
cggcacgaggcgactttggtggaggtagttctttggcagcgggcatggcgggtaccgtggtgctggacgatgtggagctgcgggaggctcagagagattacctggacttcctggacgacgaggaagaccagggaatttatcagagcaaagttcgggagctgatcagtgacaaccaataccggctgattgtcaatgtgaatgacctgcgcaggaaaaacgagaagagggctaaccggcttctgaacaatgcctttgaggagctggttgccttccagcgggccttaaaggattttgtggcctccattgatgctacctatgccaagcagtatgaggagttctacgtaggactggaaggcagctttggctccaagcacgtctccccgcggactcttacctcctgcttcctcagctgtgtggtctgtgtggagggcattgtcactaaatgttctctagttcgtcccaaagtcgtccgcagtgtccactactgtcctgctactaagaagaccatagagcgacgttattctgatctcaccaccctggtggcctttccctccagctctgtctatcctaccaaggatgaggagaacaatccccttgagacagaatatggcctttctgtctacaaggatcaccagaccatcaccatccaggagatgccggagaaggccccagccggccagctcccccgctctgtggacgtcattctggatgatgacttggtggataaagcgaagcctggtgaccgggttcaggtggtgggaacctaccgttgccttcctggaaagaagggaggctacacctctgggaccttcaggactgtcctgattgcctgtaatgttaagcagatgagcaaggatgctcagccctctttctctgctgaggatatagccaagatcaagaagttcagtaaaacccgatccaaggatatctttgaccagctggccaagtcattggccccaagtatccatgggcatgactatgtcaagaaagcaatcctctgcttgctcttgggaggggtggaacgagacctagaaaatggcagccacatccgtggggacatcaatattcttctaataggagacccatccgttgccaagtctcagcttctgcggtatgtgctttgcactgcaccccgagctatccccaccactggccggggctcctctggagtgggtctgacggctgctgtcaccacagaccaggaaacaggagagcgccgtctggaagcaggggccatggtcctggctgaccgaggcgtggtttgcattgatgaatttgacaaaatgtctgacatggatcgcacagccatccatgaagtgatggagcagggtcgagtgaccattgccaaggctggcatccatgctcggctgaatgcccgctgcagtgttttggcagctgccaaccctgtctacggcaggtatgaccagtataagactccaatggagaacattgggctacaggactcactgctgtcacgatttgacttgctcttcatcatgctggatcagatggatcctgagcaggatcgggagatctcagaccatgtccttcggatgcaccgttacagagcacctggggagcaggatggcgatgctatgcccttgggtagtgctgtggatatcctggccacagatgatcccaactttagccaggaagatcagcaggacacccagatttatgagaagcatgacaaccttctacatgggaccaagaagaaaaaggagaagatggtgagtgcagcattcatgaagaagtacatccatgtggccaaaatcatcaagcctgtcctgacacaggagtcggccacctacattgcagaagagtattcacgcctgcgcagccaggatagcatgagctcagacaccgccaggacatctccagttacagcccgaacactggaaactctgattcgactggccacagcccatgcgaaggcccgcatgagcaagactgtggacctgcaggatgcagaggaagctgtggagttggtccagtatgcttactttaagaaggttctggagaaggagaagaaacgtaagaagcgaagtgaggatgaatcagagacagaagatgaagaggagaaaagccaagaggaccaggagcagaagaggaagagaaggaagactcgccagccagatgccaaagatggggattcatacgacccctatgacttcagtgacacagaggaggaaatgcctcaagtacacactccaaagacggcagactcacaggagaccaaggaatcccagaaagtggagttgagtgaatccaggttgaaggcattcaaggtggccctcttggatgtgttccgggaagctcatgcgcagtcaatcggcatgaatcgcctcacagaatccatcaaccgggacagcgaagagcccttctcttcagttgagatccaggctgctctgagcaagatgcaggatgacaatcaggtcatggtgtctgagggcatcatcttcctcatctgaggaggcctcgtctctgaacttgggttgtgccgagagagtttgttctgtgtttcccaccctctccctgacccaagtctttgcctctactcccttaacagtgttgaattcaactgaaggcgaggaatgttggtgatgaagctgagttcaggactcggtggaccctttgggaatgggtcatgaaagctgccatggggtgaggaaagaggagacagtgggagaggacaatgactattgcatcttcattgcaaaagcactggctcatccgccctacttcccatcccacacaaacccaattgtaaataacatatgacttctgagtacttttgggggcacaactgttttctgtttgctgtttttttgttttgttttttttctccagagcactttggtctagactaggctttgggtggttccaattggtggagagaagctctgaggcacgtcatgcaggtcaagaaagctttctttgcagtagcaccagttaaggtgaatatgtattgtatcacaaaacaaacccaatatccagatgaatatccgagatgttgaataaacttagccatttcgtacaaaaaaaggggggcccggtaaac

SEQ ID NO: 135 - protein, 808 aa, Homo sapien
MAGTVVLDDVELREAQRDYLDFLDDEEDQGIYQSKVRELISDNQYRLIVNVNDLRRKNEKRANRLLNNAFEELVAFQRALKDFVASIDATYAKQYEEFYVGLEGSFGSKHVSPRTLTSCFLSCVVCVEGIVTKCSLVRPKVVRSVHYCPATKKTIERRYSDLTTLVAFPSSSVYPTKDEENNPLETEYGLSVYKDHQTITIQEMPEKAPAGQLPRSVDVILDDDLVDKAKPGDRVQVVGTYRCLPGKKGGYTSGTFRTVLIACNVKQMSKDAQPSFSAEDIAKIKKFSKTRSKDIFDQLAKSLAPSIHGHDYVKKAILCLLLGGVERDLENGSHIRGDINILLIGDPSVAKSQLLRYVLCTAPRAIPTTGRGSSGVGLTAAVTTDQETGERRLEAGAMVLADRGVVCIDEFDKMSDMDRTAIHEVMEQGRVTIAKAGIHARLNARCSVLAAANPVYGRYDQYKTPMENIGLQDSLLSRFDLLFIMLDQMDPEQDREISDHVLRMHRYRAPGEQDGDAMPLGSAVDILATDDPNFSQEDQQDTQIYEKHDNLLHGTKKKKEKMVSAAFMKKYIHVAKIIKPVLTQESATYIAEEYSRLRSQDSMSSDTARTSPVTARTLETLIRLATAHAKARMSKTVDLQDAEEAVELVQYAYFKKVLEKEKKRKKRSEDESETEDEEEKSQEDQEQKRKRRKTRQPDAKDGDSYDPYDFSDTEEEMPQVHTPKTADSQETKESQKVELSESRLKAFKVALLDVFREAHAQSIGMNRLTESINRDSEEPFSSVEIQAALSKMQDDNQVMVSEGIIFLI

SEQ ID NO: 136 - DNA, 732 bp, Homo sapien
tgctgcgaaccacgtgggtcccgggcgcgtttcgggtgctggcggctgcagccggagttcaaacctaagcagctggaaggaaccatggccaactgtgagcgtaccttcattgcgatcaaaccagatggggtccagcggggtcttgtgggagagattatcaagcgttttgagcagaaaggattccgccttgttggtctgaaattcatgcaagcttccgaagatcttctcaaggaacactacgttgacctgaaggaccgtccattctttgccggcctggtgaaatacatgcactcagggccggtagttgccatggtctgggaggggctgaatgtggtgaagacgggccgagtcatgctcggggagaccaaccctgcagactccaagcctgggaccatccgtggagacttctgcatacaagttggcaggaacattatacatggcagtgattctgtggagagtgcagagaaggagatcggcttgtggtttcaccctgaggaactggtagattacacgagctgtgctcagaactggatctatgaatgacaggagggcagaccacattgcttttcacatccatttcccctccttcccatgggcagaggaccaggctgtaggaaatctagttatttacaggaacttcatcataatttggagggaagctcttggagctgtgagttctccctgtacagtgttaccatccccgaccatctgattaaaatgcttcctcccagc

SEQ ID NO: 137 - protein, 152 aa, Homo sapien
MANCERTFIAIKPDGVQRGLVGEIIKRFEQKGFRLVGLKFMQASEDLLKEHYVDLKDRPFFAGLVKYMHSGPVVAMVWEGLNVVKTGRVMLGETNPADSKPGTIRGDFCIQVGRNIIHGSDSVESAEKEIGLWFHPEELVDYTSCAQNWIYE

SEQ ID NO: 138 - DNA, 5224 bp, Homo sapien
ggctcatagagctgaacagttgcaggatgcggaggaggaaaaagatgattcaaatgaagaagaaaacaaagacagccttgtagatgatgaagaagagaaagaagatcttggcgatgaggatgaagcagaggaagaagaggaggaggacaacttggctgctggtgtggatgaggagagaagtgaggccaatgatcaggggcccccaggagaggacggtgtgacccgggaggaagtagagcctgaggaggctgaagaaggcatctctgagcaaccctgcccagctgacacagaggtggtggaagactccttgaggcagcgtaaaagtcagcatgctgacaagggactgtagatttaatgatgcgttttcaagaatacacaccaaaacaatatgtcagcttccctttggcctgcagtttgtaccaaatccttaatttttcctgaatgagcaagcttctcttaaaagatgctctctagtcatttggtctcatggcagtaagcctcatgtatactaaggagagtcttccaggtgtgacaatcaggatatagaaaaacaaacgtagtgttgggatctgtttggagactgggatgggaacaagttcatttacttaggggtcagagagtctcgaccagaggaggccattcccagtcctaatcagcaccttccagagacaaggctgcaggccctgtgaaatgaaagccaagcaggagccttggctcctgagcatccccaaagtgtaacgtagaagccttgcatccttttcttgtgtaaagtatttatttttgtcaaattgcaggaaacatcaggcaccacagtgcatgaaaaatctttcacagctagaaattgaaagggccttgggtatagagagcagctcagaagtcatcccagccctctgaatctcctgtgctatgttttatttcttacctttaatttttccagcatttccaccatgggcattcaggctctccacactcttcactattatctcttggtcagaggactccaataacagccaggtttacatgaactgtgtttgttcattctgacctaaggggtttagataatcagtaaccataacccctgaagctgtgactgccaaacatctcaaatgaaatgttgtggccatcagagactcaaaaggaagtaaggattttacaagacagattaaaaaaaaatggttttgtccaaaatatagttgttgttgatttttttttaagttttctaagcaatatttttcaagccagaagtcctctaagtcttgccagtacaaggtagtcttgtgaagaaaagttgaatactgttttgttttcatctcaaggggttccctgggtcttgaactactttaataataactaaaaaaccacttctgattttccttcagtgatgtgcttttggtgaaagaattaatgaactccagtacctgaaagtgaaagatttgattttgtttccatcttctgtaatcttccaaagaattatatctttgtaaatctctcaatactcaacctactgtaagtacccagggaggctaatttccttaaaaaaaaaaaatctatccatctacttctctcttacctgatttatgtgttagaataaattcatgaaattcgattccaagcatacgaaagatgcctaaagttgattctatgctccttagatccagacagaataatgagtacaggtttatgaaattctaaaagtttctgtcgtctttaaaaaggaacgtgcagtatatttctatctggctgtttagataaccctttccttgtattaattgtgagcacggagctcactggtgggggaggttctgaaactctctgccctcctgtggttgaatgaagatgttgcaagacttgcacaaaggaggttattcttctgacagcatcaacttttagagatggttctttttcatctttccaattcagttacttgacagtctccttccccagtatgctgaagtttgttaagagtcaccagtaattgtgcttttcagacagtagtgcagcttcaaaatcgaggccatcactgggctgatgggctgggagaaccttgccatgtgcctgcctgtttcctgcccccttagtcactgcccatttcctgcccccttggtcgctgacacaccttcacccaaagtgccatggttctgatggtggcagttccatctccctgacatcaggaagcttttctcgatcagagcagagcggggcctgcctgccctcgtgtcactggatttctttctcttataatcagctgaaacagagttctcaaagaacagtaaactcaggttcagaggtattatggaataagaatggtttcatagtttggcttttctatataattcctccctctcaaactgaaatattcatttttttagtggagtatttgactagagagaaggtaaggcagaaatacagtctacactggcttttaaaaatgtaaagccaatttccaaccggaccccaaatagtacaggttgaacattccgttccaacaatccaaaaccccaaatgctccaaaatcttaaactttgagttccagcattccgtcagaagtggaaaattttacacctgacctcatttgacaggtggcagttacagtgcaatcaaaactttgttccatgcccaagattattaaaaatattggataaaattaccttcaagctatgttgtataaggtgtatataaaacaaatgaattttgtgtttagacttgggtctactcccaagatacctcattatatatatacaaaaatccccaaatccaaaaacatttgaaacacttctggtcccacacattttggataagggatatttgacctatatctaattatataataagaaaaatgtattttctttttttttttttttttgagatggagtttcactcttgttgtcgcccaggctgcaatggcacaatcttggcttactacaacctccgcctccctagttcaagggattctcctgcctcagcctcccaggtagctgggattacaggcatgtgccaccatgcctggctaattttgtatttttagtagagacggggtttcgccatgttggtcagactggtcttgaactcctgacctcaggtgatccgcccgcctcagcctcccaacgtgctgggattacaggtgtgagccaccgtacctggcagaaaatgtactttctttctcagaaatacttttaaaaaaaattgaagggtgaggagaaaaacatcttggagaagaggacccattaaaactttaaatatctgtgggaaccatttttcctgattttcccttttttaacatcatggcaaagatgggtttttttccaacaaaatttaatttaatatctttccacttgaagattttaggtttgttttcaatacttaatgaatataaaactaaaggagaaaagccaacctgaaataatttaaactttatatgaacatttcgataagagtttgtggattttttctgtagataatatatttgatccagaactcaagtgcatggaaacatgattttgatttttaaaatctaaaaaaaaaaaaaattaaaatcatgcttccctctattgcagtatcagttatttagtcacagaatggtattttatgtaaattaaaattaggtgaatgcaatgcaggtaactggttttggaatgggaatgtgcagtgctttatgtttggggagttggagcagggtatcttttcatcaattagaaggaaagtttgaaacttctgattacctttatgttggtttctcttattatttgtctcttgctagatctgctaaaccaacccagcttgctcagagatctcatattgaagcaacatacaggcaatccacatctttctttccctttgaagtatagtcattggatgggatgagggacagggcctgttgggttcacagggccttgcactgcatgggcacatacttaaaagctcttgtgcatggaatccctgtctgttagccacaggcctctttagctctatacattcaaaataactactgtagtagaaaatagataagcttcagctgagttggcttttgatagtggaaaaaaaacaaaatttgactttttatggccaaaattccttgttgacagctgtgatgttctaatatgatttgggaatatgtcagtctacagaacctgcatcctgtaaaaacacctttggggtagacgataaaagtcatttttaaggcaaatacttaccatgtgactttttattaccaaatgcatcagtagtggagctggtatgttgtttcataggatggaaacattagaagtccagagaaaaataaattttaaaaaaaggtggaaaagttacggcaaacctgagatttcagcataaaatctttagtatgaagtgagagaaagaagagggaggctggttctgttgctcgtatcaataggttatctgtgtccctcatcttggtgttacagtgttatttctgtcagtattatgaatatgtggttgacccatcctgtcaaatgtaccaacattttcgaaagaattcattcaaatctcttatgccaacagaaaagttccttcttgtttaatatctctttacctcagtcctacattttgattctctggaggagattttagcttgtcttaaaaagccaaatttggagtcatcaagcctgctgaacctgatggggcagctttttgaacagctttctggaagtaagaacttcagttgaaaagccctttgatcgcttcagcccgggacatgcccttcagatggcttattctcagtaaagctttatgtagactgtgacactgtatatgtgtgactcgtacaactttgacgtgtttctgaagtggtttaatcgtatttgttattagcttctttgtggaaatgcaatttttatactaaaaacattgcttatttgcaatgcaatatgttataaatttgttgtttatattactggtattagtcttagcctaatgaacctaattatttttctttctgtattctttgcttcctcaaatagcatctgcagcaattggaatgagaaatccagatatgtgtttcaagtagtacattgcctgaatcacaaatcacttgatcacagtattgtatataatccctgatcctatttgtttcattttattgtaaattcccatttgcatcaaaacctaatgatagtgattggtaagtaaaaacaaatggtgtattgcttttcatacaagtgttttcacaaaagccatttgcctaggcagcaaaaaatattaatttgtt

SEQ ID NO: 139 - DNA, 1542 bp, Homo sapien
ctgaagatggcggctgctgtaggacggttgctccgagcgtcggttgcccgacatgtgagtgccattccttggggcatttctgccactgcagccctcaggcctgctgcatgtggaagaacgagcttgacaaatttattgtgttctggttccagtcaagcaaaattattcagcaccagttcctcatgccatgcacctgctgtcacccagcatgcaccctattttaagggtacagccgttgtcaatggagagttcaaagacctaagccttgatgactttaaggggaaatatttggtgcttttcttctatcctttggatttcacctttgtgtgtcctacagaaattgttgcttttagtgacaaagctaacgaatttcacgatgtgaactgtgaagttgtcgcagtctcagtggattcccactttagccatcttgcctggataaatacaccaagaaagaatggtggtttgggccacatgaacatcgcactcttgtcagacttaactaagcagatttcccgagactacggtgtgctgttagaaggttctggtcttgcactaagaggtctcttcataattgaccccaatggagtcatcaagcatttgagcgtcaacgatctcccagtgggccgaagcgtggaagaaaccctccgcttggtgaaggcgttccagtatgtagaaacacatggagaagtctgcccagcgaactggacaccggattctcctacgatcaagccaagtccagctgcttccaaagagtactttcagaaggtaaatcagtagatcacccatgtgtatctgcaccttctcaactgagagaagaaccacagttgaaacctgcttttatcattttcaagatggttatttgtagaaggcaaggaaccaattatgcttgtattcataagtattactctaaatgttttgtttttgtaattctggctaggaccttttaaacatggttagttgctagtacaggaatcgtttattggtaacatcttggtggctggctagctagtttctacagaacataatttgcctctatagaaggctattcttagatcatgtctcaatggaaacactcttctttcttagccttacttgaatcttgcctataataaagtagagcaacacacattgaaagcttctgatcaacggtcctgaaattttcatcttgaatgtctttgtattaaactgaattttcttttaagctaacaaagatcataattttcaatgattagccgtgtaactcctgcaatgaatgtttatgtgattgaagcaaatgtgaatcgtattattttaaaaagtggcagagtgacttaactgatcatgcatgatccctcatccctgaaattgagtttatgtagtcattttacttattttattcattagctaactttgtctatgtatatttctagatattgattagtgtaatcgattataaaggatatttatcaaatccagggattgcattttgaaattataattattttctttgctgaagtattcattgtaaaacatacaaataacatatttaaacaaaaaaaaaaa

SEQ ID NO: 140 - protein, 256 aa, Homo sapien
MAAAVGRLLRASVARHVSAIPWGISATAALRPAACGRTSLTNLLCSGSSQAKLFSTSSSCHAPAVTQHAPYFKGTAVVNGEFKDLSLDDFKGKYLVLFFYPLDFTFVCPTEIVAFSDKANEFHDVNCEVVAVSVDSHFSHLAWINTPRKNGGLGHMNIALLSDLTKQISRDYGVLLEGSGLALRGLFIIDPNGVIKHLSVNDLPVGRSVEETLRLVKAFQYVETHGEVCPANWTPDSPTIKPSPAASKEYFQKVNQ

SEQ ID NO: 141 - DNA, 1345 bp, Homo sapien
acttggccttacactccgctcggctcaccatgtgtcactctcgcagctgccacccgaccatgaccatcctgcaggccccgaccccggccccctccaccatcccgggaccccggcggggctccggtcctgagatcttcaccttcgaccctctcccggagcccgcagcggcccctgccgggcgccccagcgcctctcgcgggcaccgaaagcgcagccgcagggtctctctaccctcgagtggtgagtatcgccgaagtgggcattcgcggtgtgcgctgccctggagtcactggggaacgacccgactccagagcctcgacctgacctgtctcctgttttgtctccccttagtccggcgccagctgccagtcgaggaaccgaacccagccaaaaggcttctctttctgctgctcaccatcgtcttctgccagatcctgatggctgaagagggtgtgccggcgcccctgcctccagaggacgcccctaacgccgcatccctggcgcccacccctgtgtcccccgtcctcgagccctttaatctgacttcggagccctcggactacgctctggacctcagcactttcctccagcaacacccggccgccttctaactgtgactccccgcactccccaaaaagaatccgaaaaaccacaaagaaacaccaggcgtacctggtgcgcgagagcgtatccccaactgggacttccgaggcaacttgaactcagaacactacagcggagacgccacccggtgcttgaggcgggaccgaggcgcacagagaccgaggcgcatagagaccgaggcacagcccagctgggctaggccggtgggaaggagagcgtcgttaatttatttcttattgctcctaattaatatttatatgtatttatgtacgtcctcctaggtgatggagatgtgtacgtaatatttattttaacttatgcaagggtgtgagatgttccctctgctgtaaatgcaggtctcttggtatttattgagctttgtgggactggtggaagcaggacacctggaactgcggcaaagtaggagaagaaatggggaggactcgggtgggggaggacgtcccggctgggatgaagtctggtggtgggtcgtaagtttaggaggtgactgcatcctccagcatctcaactccgtctgtctactgtgtgagacttcggcggaccattaggaatgagatccgtgagatccttccatcttcttgaagtcgcctttagggtggctgcgaggtagagggttgggggttggtgggctgtcacggagcgactgtcgagatcgcctagtatgttctgtgaacacaaataaaattgatttactgtctgc

SEQ ID NO: 142 - protein, 193 aa, Homo sapien
MCHSRSCHPTMTILQAPTPAPSTIPGPRRGSGPEIFTFDPLPEPAAAPAGRPSASRGHRKRSRRVSLPSSGEYRRSGHSRCALPWSHWGTTRLQSLDLTCLLFCLPLVRRQLPVEEPNPAKRLLFLLLTIVFCQILMAEEGVPAPLPPEDAPNAASLAPTPVSPVLEPFNLTSEPSDYALDLSTFLQQHPAAF

SEQ ID NO: 143 - DNA, 5493 bp, Homo sapien
atggcagaaggtgtgaatgagccttgtttcccgggggactgtggcatatttgtcactaaagtggacaaaggaagcattgctgatggccgcttaagggtcaatgactggctgctgagaatcaacgatgtggacctcatcaacaaggacaagaagcaggccatcaaggcgctcctcaatggggagggggccatcaacatggtcgtgcggcggaggaagtccctgggtgggaaggtggtcacgccgctgcacatcaacctcagtggacagaaagacagtggcatcagtctggagaatggagtgtatgctgccgctgtgctgcctggaagccctgccgctaaagaagggtcccttgctgtgggagacaggatcgttgcgatcaatggcattgcactggacaacaagtctctgaatgaatgtgaatctctgctgcggagctgccaggactccctgaccctgtccctcctgaaggtattccctcagagctcctcgtggagtggccagaacatttttgaaaatatcaaagactctgataagatgctgagttttcgagcccatggcccggaggtccaggctcataacaaacggaacttgatacagcacaataactccacgcagacagacatcttctacacggacaggctggaagacaggaaggagccaggccccccaggaggcagcagctcctttctgcataagccattccctgggggacccttgcaggtctgcccccaggcctgtcccagtgcctctgagcgtagcctgagctccttccgctcagatgcctctggggaccgtggctttgggctggtggacgtgcgtggccggcggccactgctgccctttgagaccgaggtgggcccctgtggggttggggaggcctccctggacaaggcagactctgaaggctccaacagcggcgggacctggcccaaggccatgctcagctccacggcagtgcctgagaagctctctgtttataaaaagccaaagcaaagaaagtccatctttgaccctaacactttcaaacgcccccagacaccccccaaaatagactacctgcttccaggtcctgggcctgctcactctccccagccctccaagagggcggggcctctgacacccccaaaacctcccagaaggagcgactccattaagttccagcacaggctggagactagctccgagtcagaagccactctggtgggcagctccccatccactagtcccccgagcgccctgccccctgacgtggaccccggggagcccatgcacgcatcaccccctcgcaaggccagggtccgcattgcttccagctactaccctgaaggagatggggactcctcccacctgccggccaagaaatcctgtgatgaggacctcacctcccagaaggtggatgagctggggcagaagcgtcgccggccaaaatctgctcccagttttcggccgaagcttgctccagtagtgattcctgctcagttcctggaggaacagaagtgtgtcccggccagtggagaactctccccggagctccaggagtgggcaccttactcgcctgggcattccagccggcacagcaaccccccgctataccctagcaggccgtctgtgggtactgttccccggagtttgacccccagcaccactgtgagctccatcctgcggaaccccatctacactgtgcgcagtcacagggtcggcccctgcagctctccacctgcggcccgagatgctggcccccagggtttgcatcccagtgtccagcaccagggacgcctgagcctggacctgagccacaggacctgcagcgactactccgagatgagagccacccatgggtccaactcactgccctccagcgcccgcctgggttcttcgagtaacttgcagttcaaggcggaacgcattaaaatcccatcaacaccaagatatccgcggagtgtcgtgggctccgagagaggttcagtgtcacattctgaatgcagcactcctccacagtcacccctgaacatcgacaccctgtcctcttgtagccagtcccagacctcagcctccacattgcccagaatcgctgtcaaccccgcgtccctcggggagcggagaaaggacaggccttatgtggaggagccacgccacgtgaaggtgcagaagggctcagagccgctgggcatctccatcgtgagtggagagaagggcggcatctacgtctccaaggtgaccgtggggagcatcgctcaccaggctggcctcgagtatggggatcagttactggagttcaacggcataaacctgcggagcgccacggagcagcaggcgcggctcatcatcgggcagcagtgtgataccatcaccatcctggcccagtacaacccccacgtgcaccagctcagcagccactcccggtccagctcacacctggaccctgccggtacccactccactctccagggcagtggcaccaccaccccggagcatccatctgtcatcgacccactgatggagcaggacgaggggcctagcacccccccagccaagcagagcagctccaggattgcgggagatgccaacaagaagaccctggagccacgcgttgtcttcatcaaaaagtcccagctggagcttggggtgcacttgtgtggtgggaacctgcatggggtgtttgtggccgaggtggaggatgacagtcctgccaagggtcctgacggcctcgtgccaggggacctcatcctggagtatggcagcctggacgtgcggaacaagacagtggaggaagtctatgtggagatgctgaagcccagggatggcgtccgcctgaaggtgcagtaccgccctgaggagttcacgaaggccaagggcctgcctggtgacagcttctacatcagggccctgtacgaccggctggcagatgtggagcaagagttgagctttaagaaggacgacatcctctacgtggatgacaccttaccccagggcacgttcgggtcctggatggcttggcagctggacgagaatgcccagaagatccagcgcgggcagattcccagcaaatatgtgatggaccaagaattctccaggaggctcagcatgtctgaagtcaaagatgacaatagcgccacaaagacgctgtcagcggctgcacgccggtccttttttcggaggaaacacaagcacaaacgcagcgggtccaaggacgggaaagacctgctcgccttggatgccttttccagtgactccattccactctttgaagattcggtgagcctggcctatcagcgggtccagaaggtggactgcaccgctctgaggcctgtcctgattctggggcctttgctggacgtggtgaaggagatgctggtgaatgaggctcctggcaagttctgcagatgtccccttgaggtgatgaaggcctcccagcaggccattgagcggggtgtcaaagattgcctgtttgtcgactataagcggagaagcggccatttcgatgtgaccactgtggcgtcaataaaggagatcacagaaaagaaccgacactgcctcctggacattgctccgcacgctattgagcggctccaccacatgcacatctaccccattgtcatcttcatccactacaagagcgccaagcacatcaaggagcagagagaccccatctacctgagggacaaggtgactcagaggcattccaaagagcagtttgaggcggcgcagaagcttgagcaggagtacagcaggtacttcacaggggtcatccagggaggagccctgtcaagcatttgcactcagatcttggcaatggtcaatcaagaacaaaataaagtcctgtggattccagcctgcccgctctaggagaatgctgtgctgtggatgactgcagctggccgcctgaggggacgccagactcagctcttttctagcgactgaaagtagaagtctgtctgtctatgaacatgcgggggaaggatccggaaccaggacccagaagcacctcctttgtagacagagggccacggctgcgtgcgatccaggcccaggcccacacactctgcccgtgtcacacgtgtgctttaacacaaaacagataacactaaagacgggttcagcacccacctttctttagccagctgatcagagatgctgcaaagagaacctttcggatcactcgtttacaagccttttctaagtatttggtggtttatgtttacttgaacggctccatgttgccggtgcccagcccctgtcccctctgtcaaccccctgtcgctttggtgttggtttcgttcccgtcttcagcaaaacgaccttggaacctcaatgggggctgctttgctttgggaggttcttgttggtgggaccagagctttgacaaacctcctgctccttggtggcacctctcctggaaggacatcacaactccaggtgctcagactgcctgtggcagcagaaccagtgcctttggcattttcctcccacaatggggaaggtgactttggcattcttacaaactcgtctctcggcctttctctcctgccttccacagcctctcgtttctcctccatctgtgcttattacttgaggactgtgtctgctccgtgagagctgcgtgggcagggctgcagtggggtccaggtggtgttcagctgtgctgatgcctgccattgggtcctccttaggctctgtaagtcgtgacagccttcatcagtgcaatgtttgcagggtaattcttaaactttttagagggtggcaggtacatcagttctttttgatatgaaaacattcatgtttcagacattgaattgagagcttttaggggaagcataatggttattgtcactatcaacagtctaaaaagaaaaactgaggtctttttaatcttgattacagcactcacggcatgcaccctactcagtgtgggtgtcttcgtttgggggctttttttttttttgcacttctgaggctagatatgtctggctgaagatttgatgtggttcctccttaagctatgcgtcctgttaataataggtactgtactgggctctgtgtaagtgtcgttggggtaggacctatattttaatactgttcctaacatttcattttactagcgagaaatctttgatttcattttattctttgtaattctagacactagattgtagtttagccataactgatgttttttaaaaagggatatattttcttgcacagttgttcaaaaaagagacaagtttcagtcctcaatgctgtcctttgttttacaggtacaagttttctagctcagacaaactatgaaaaactgtagactattctcaaggtattaactcgcagaccctctgggggtaggggctgttttctaagttacaggcagagtgggactgagatggtacagtgtgcacagacaggtactgagctgacagactgggattttctgtactaaaatgttactttgtatcaaaagttaaacaggctttagtacaacaaataaaggtcaatttctgt

SEQ ID NO: 144 - DNA, 1568 bp, Homo sapien
cgcaacgccggtgcctgaggagcgatgccgagggaaatcatcaccctacagttgggccagtgcggcaatcagattgggttcgagttctggaaacagctgtgcgccgagcatggtatcagccccgaggcgatcgtggaggagttcgccaccgagggcactgaccgcaaggacgtctttttctaccaggcagacgatgagcactacatcccccgggccgtgctgctggacttggaaccccgggtgatccactccatcctcaactccccctatgccaagctctacaacccagagaacatctacctgtcggaacatggaggaggagctggcaacaactgggccagcggattctcccagggagaaaagatccatgaggacatttttgacatcatagaccgggaggcagatggtagtgacagtctagagggctttgtgctgtgtcactccattgctggggggacaggctctggactgggttcctacctcttagaacggctgaatgacaggtatcctaagaagctggtgcagacatactcagtgtttcccaaccaggacgagatgagcgatgtggtggtccagccttacaattcactcctcacactcaagaggctgacgcagaatgcagactgtctggtggtgctggacaacacagccctgaaccggattgccacagaccgcctgcacatccagaacccatccttctcccagatcaaccagctggtgtctaccatcatgtcagccagcaccaccaccctgcgctaccctggctacatgaacaatgacctcatcggcctcatcgcctcgctcattcccaccccacggctccacttcctcatgaccggctacacccctctcactacggaccagtcagtggccagcgtgaggaagaccacggtcctggatgtcatgaggcggctgctgcagcccaagaacgtgatggtgtccacaggccgagaccgccagaccaaccactgctacatcgccatcctcaacatcatccagggagaggtggaccccacccaggtccacaagagcttgcagaggatccgggaacgcaagttggccaacttcatcccgtggggccccgccagcatccaggtggccctgtcgaggaagtctccctacctgccctcggcccaccgggtcagcgggctcatgatggccaaccacaccagcatctcctcgctcttcgagagaacctgtcgccagtatgacaagctgcgtaagcgggaggccttcctggagcagttccgcaaggaggacatgttcaaggacaactttgatgagatggacacatccagggagattgtgcagcagctcatcgatgagtaccatgcggccacacggccagactacatctcctggggcacccaggagcagtgagtcccccaggacaggggaccctcatctgccttactggttggcccaagccctgcctgactgaccaccccctcagagcacagatcagggacctcacgcatctctttctcatatacatggactctctgttggcctgcaaacacatttacttctcctcttatgagactatttatctttaataaagcactggg

SEQ ID NO: 145 - protein, 451 aa, Homo sapien
MPREIITLQLGQCGNQIGFEFWKQLCAEHGISPEAIVEEFATEGTDRKDVFFYQADDEHYIPRAVLLDLEPRVIHSILNSPYAKLYNPENIYLSEHGGGAGNNWASGFSQGEKIHEDIFDIIDREADGSDSLEGFVLCHSIAGGTGSGLGSYLLERLNDRYPKKLVQTYSVFPNQDEMSDVVVQPYNSLLTLKRLTQNADCLVVLDNTALNRIATDRLHIQNPSFSQINQLVSTIMSASTTTLRYPGYMNNDLIGLIASLIPTPRLHFLMTGYTPLTTDQSVASVRKTTVLDVMRRLLQPKNVMVSTGRDRQTNHCYIAILNIIQGEVDPTQVHKSLQRIRERKLANFIPWGPASIQVALSRKSPYLPSAHRVSGLMMANHTSISSLFERTCRQYDKLRKREAFLEQFRKEDMFKDNFDEMDTSREIVQQLIDEYHAATRPDYISWGTQEQ

SEQ ID NO: 146 - DNA, 2864 bp, Homo sapien
agataacaagagtaatccacagacttaaaacatgagctcagatgccagccaaggcgtgattaccactcctcctcctcccagcatgcctcacaaagagagatattttgaccgcatcaatgaaaatgacccagaatacattagggagaggaacatgtctcctgatctacgacaagacttcaacatgatggagcagaggaaacgagttactcagatcctgcaaagtcctgcctttcgggaagacttggaatgccttattcaagaacagatgaagaaaggccacaacccaactggattactagcattacagcagattgcagattacatcatggccaattctttctcgggtttttcttcacctcctctcagtcttggcatggtcacacctatcaatgaccttcctggtgcagatacatcctcatatgtgaagggagaaaaacttactcgctgtaaacttgccagcctgtacagacttgtagacttgtttggatgggcacacctggcaaatacctatatctcagtaagaataagtaaggagcaagaccacattataataattcccagaggcctatctttttctgaagctacagcctccaatttggtgaaagtcaatataataggagaagtggttgaccagggaagtaccaatttgaaaattgaccatacaggattcagtccccatgctgcaatctattcaacacgtcctgatgttaagtgtgtcatacacatccatacccttgcaacagcagctgtatcctccatgaaatgtgggatccttccaatttctcaagagtctcttcttctgggagatgttgcctattatgactaccaagggtcacttgaagaacaggaggagagaattcaactgcagaaggttctgggaccaagttgtaaggtgctggtactcaggaatcatggtgtggttgcacttggagaaacattagaggaggcttttcattatatttttaatgtgcaactagcctgtgagattcaggtgcaggccctagcaggtgcaggtggagtagacaatctccatgtactggactttcagaagtataaagctttcacttacactgtagcagcgtctggtggaggaggtgtgaatatgggttcccatcaaaaatggaaggttggcgaaattgagtttgaagggcttatgaggactctggacaacttggggtatagaacaggctatgcttacaggcatcctctcattcgagagaagcctaggcacaagagtgatgtggaaatcccagcaactgtgactgctttttcctttgaagacgatacagtgccactctctcctctcaaatacatggcacagaggcaacagcgtgaaaaaacaagatggctgaactcaccaaatacttacatgaaagtgaatgtgcctgaggagtctcggaacggagaaaccagtccccgaaccaaaatcacgtggatgaaagcagaagactcatctaaagttagtggtggaacacctatcaaaattgaagatccaaatcagtttgttcctttaaacacaaacccgaatgaggtactagaaaagagaaataagattcgggaacaaaatcgatatgacttgaaaacagcaggaccacaatctcagttgcttgctggaattgttgtggataagccaccttctactatgcaatttgaagatgatgatcatggcccaccagctcctcctaacccatttagtcatctcacagaaggagaacttgaagagtataagaggacaatcgaacgtaaacaacaaggcctagaagatgctgagcaggaattactctcagatgacgcttcatctgtttcacaaattcagtctcaaactcagtcaccgcaaaatgtccctgaaaaattagaagaaaaccatgagctgttttccaagagcttcatctccatggaagtgcctgtcatggtagtaaatggcaaggatgatatgcatgatgttgaagatgagcttgctaagcgagtgagtaggttaagcacaagtacaaccatagaaaacatcgagattactattaagtctccagagaaaatcgaagaagtcctgtcacctgaaggctccccttcaaaatcgccatccaagaaaaagaagaaattccgcactccttcttttctgaaaaagaacaaaaaaaaggagaaagttgaggcctaaataaagtctttttataattattattataacaatgtgacattgcacatctaaataccacatttaagttgatcattaatatgcaatggtagatcagattgggggatgtagcaaactggactttaagaactggaaagaggttttacaaaagaaaaactttcagattcatctctcattttatatgtccagaaatggctttgaattttaagcaattactagttttaattagctctgccctcatgaagtattattataattcaccataaacagctatctgtctgaattacttcaggccttctccataatatctgttagaaagaaattgccagtgagcaagtgagaatttttatttctcaatacctgcttcacttgataatcatattataattttttatcatgattattgactatatttttggagtcccattgtttcagtgggcattaacagaatgctttaaaaacttctaagacaagaatctatagcattagtatacactggcacataattttttaaaaagttttaagaaaagattcatttggaattttattcacagtataaaatttcctcacctgaagtaactttgtttgccaaaaaagttgttttaataaactataatttttgaaaacttccttttttattagtttagaaagccccttatttttcaacaaaggggattttgtacacataacatgggttatttagtttaactctggc

SEQ ID NO: 147 - protein, 706 aa, Homo sapien
MSSDASQGVITTPPPPSMPHKERYFDRINENDPEYIRERNMSPDLRQDFNMMEQRKRVTQILQSPAFREDLECLIQEQMKKGHNPTGLLALQQIADYIMANSFSGFSSPPLSLGMVTPINDLPGADTSSYVKGEKLTRCKLASLYRLVDLFGWAHLANTYISVRISKEQDHIIIIPRGLSFSEATASNLVKVNIIGEVVDQGSTNLKIDHTGFSPHAAIYSTRPDVKCVIHIHTLATAAVSSMKCGILPISQESLLLGDVAYYDYQGSLEEQEERIQLQKVLGPSCKVLVLRNHGVVALGETLEEAFHYIFNVQLACEIQVQALAGAGGVDNLHVLDFQKYKAFTYTVAASGGGGVNMGSHQKWKVGEIEFEGLMRTLDNLGYRTGYAYRHPLIREKPRHKSDVEIPATVTAFSFEDDTVPLSPLKYMAQRQQREKTRWLNSPNTYMKVNVPEESRNGETSPRTKITWMKAEDSSKVSGGTPIKIEDPNQFVPLNTNPNEVLEKRNKIREQNRYDLKTAGPQSQLLAGIVVDKPPSTMQFEDDDHGPPAPPNPFSHLTEGELEEYKRTIERKQQGLEDAEQELLSDDASSVSQIQSQTQSPQNVPEKLEENHELFSKSFISMEVPVMVVNGKDDMHDVEDELAKRVSRLSTSTTIENIEITIKSPEKIEEVLSPEGSPSKSPSKKKKKFRTPSFLKKNKKKEKVEA

SEQ ID NO: 148 - DNA, 2768 bp, Homo sapien
agataacaagagtaatccacagacttaaaacatgagctcagatgccagccaaggcgtgattaccactcctcctcctcccagcatgcctcacaaagagagatattttgaccgcatcaatgaaaatgacccagaatacattagggagaggaacatgtctcctgatctacgacaagacttcaacatgatggagcagaggaaacgagttactcagatcctgcaaagtcctgcctttcgggaagacttggaatgccttattcaagaacagatgaagaaaggccacaacccaactggattactagcattacagcagattgcagattacatcatggccaattctttctcgggtttttcttcacctcctctcagtcttggcatggtcacacctatcaatgaccttcctggtgcagatacatcctcatatgtgaagggagaaaaacttactcgctgtaaacttgccagcctgtacagacttgtagacttgtttggatgggcacacctggcaaatacctatatctcagtaagaataagtaaggagcaagaccacattataataattcccagaggcctatctttttctgaagctacagcctccaatttggtgaaagtcaatataataggagaagtggttgaccagggaagtaccaatttgaaaattgaccatacaggattcagtccccatgctgcaatctattcaacacgtcctgatgttaagtgtgtcatacacatccatacccttgcaacagcagctgtatcctccatgaaatgtgggatccttccaatttctcaagagtctcttcttctgggagatgttgcctattatgactaccaagggtcacttgaagaacaggaggagagaattcaactgcagaaggttctgggaccaagttgtaaggtgctggtactcaggaatcatggtgtggttgcacttggagaaacattagaggaggcttttcattatatttttaatgtgcaactagcctgtgagattcaggtgcaggccctagcaggtgcaggtggagtagacaatctccatgtactggactttcagaagtataaagctttcacttacactgtagcagcgtctggtggaggaggtgtgaatatgggttcccatcaaaaatggaaggttggcgaaattgagtttgaagggcttatgaggactctggacaacttggggtatagaacaggctatgcttacaggcatcctctcattcgagagaagcctaggcacaagagtgatgtggaaatcccagcaactgtgactgctttttcctttgaagacgatacagtgccactctctcctctcaaatacatggcacagaggcaacagcgtgaaaaaacaagatggctgaactcaccaaatacttacatgaaagtgaatgtgcctgaggagtctcggaacggagaaaccagtccccgaaccaaaatcacgtggatgaaagcagaagactcatctaaagttagtggtggaacacctatcaaaattgaagatccaaatcagtttgttcctttaaacacaaacccgaatgaggtactagaaaagagaaataagattcgggaacaaaatcgatatgacttgaaaacagcaggaccacaatctcagttgcttgctggaattgttgtggataagccaccttctactatgcaatttgaagatgatgatcatggcccaccagctcctcctaacccatttagtcatctcacagaaggagaacttgaagagtataagaggacaatcgaacgtaaacaacaaggcctagaagaaaaccatgagctgttttccaagagcttcatctccatggaagtgcctgtcatggtagtaaatggcaaggatgatatgcatgatgttgaagatgagcttgctaagcgagtgagtaggttaagcacaagtacaaccatagaaaacatcgagattactattaagtctccagagaaaatcgaagaagtcctgtcacctgaaggctccccttcaaaatcgccatccaagaaaaagaagaaattccgcactccttcttttctgaaaaagaacaaaaaaaaggagaaagttgaggcctaaataaagtctttttataattattattataacaatgtgacattgcacatctaaataccacatttaagttgatcattaatatgcaatggtagatcagattgggggatgtagcaaactggactttaagaactggaaagaggttttacaaaagaaaaactttcagattcatctctcattttatatgtccagaaatggctttgaattttaagcaattactagttttaattagctctgccctcatgaagtattattataattcaccataaacagctatctgtctgaattacttcaggccttctccataatatctgttagaaagaaattgccagtgagcaagtgagaatttttatttctcaatacctgcttcacttgataatcatattataattttttatcatgattattgactatatttttggagtcccattgtttcagtgggcattaacagaatgctttaaaaacttctaagacaagaatctatagcattagtatacactggcacataattttttaaaaagttttaagaaaagattcatttggaattttattcacagtataaaatttcctcacctgaagtaactttgtttgccaaaaaagttgttttaataaactataatttttgaaaacttccttttttattagtttagaaagccccttatttttcaacaaaggggattttgtacacataacatgggttatttagtttaactctggc

SEQ ID NO: 149 - protein, 674 aa, Homo sapien
MSSDASQGVITTPPPPSMPHKERYFDRINENDPEYIRERNMSPDLRQDFNMMEQRKRVTQILQSPAFREDLECLIQEQMKKGHNPTGLLALQQIADYIMANSFSGFSSPPLSLGMVTPINDLPGADTSSYVKGEKLTRCKLASLYRLVDLFGWAHLANTYISVRISKEQDHIIIIPRGLSFSEATASNLVKVNIIGEVVDQGSTNLKIDHTGFSPHAAIYSTRPDVKCVIHIHTLATAAVSSMKCGILPISQESLLLGDVAYYDYQGSLEEQEERIQLQKVLGPSCKVLVLRNHGVVALGETLEEAFHYIFNVQLACEIQVQALAGAGGVDNLHVLDFQKYKAFTYTVAASGGGGVNMGSHQKWKVGEIEFEGLMRTLDNLGYRTGYAYRHPLIREKPRHKSDVEIPATVTAFSFEDDTVPLSPLKYMAQRQQREKTRWLNSPNTYMKVNVPEESRNGETSPRTKITWMKAEDSSKVSGGTPIKIEDPNQFVPLNTNPNEVLEKRNKIREQNRYDLKTAGPQSQLLAGIVVDKPPSTMQFEDDDHGPPAPPNPFSHLTEGELEEYKRTIERKQQGLEENHELFSKSFISMEVPVMVVNGKDDMHDVEDELAKRVSRLSTSTTIENIEITIKSPEKIEEVLSPEGSPSKSPSKKKKKFRTPSFLKKNKKKEKVEA

SEQ ID NO: 150 - DNA, 2525 bp, Homo sapien
ttttcccgcgaaactcggcggctgagcgtggaggttcttgtctcccctggtttgtgaagtgcggaaaaccagaggcgcagtcatgtcgggattcgacgatcctggcattttctacagcgacagcttcgggggcgacgcccaggccgacgaggggcaggcccgcaaatcgcagctgcagaggcgcttcaaggagttcctgcggcagtaccgagtgggcaccgaccgcacgggcttcaccttcaaatacagggatgaactcaagcggcattacaacctgggggagtactggattgaggtggagatggaggatctggccagctttgatgaggacctggccgactacttgtacaagcagccagccgagcacctgcagctgctggaggaagctgccaaggaggtagctgatgaggtgacccggccccggccttctggggaggaggtgctccaggacatccaggtcatgctcaagtcggacgccagcccttccagcattcgtagcctgaagtcggacatgatgtcacacctggtgaagatccctggcatcatcatcgcggcctctgcggtccgtgccaaggccacccgcatctctatccagtgccgcagctgccgcaacaccctcaccaacattgccatgcgccctggcctcgagggctatgccctgcccaggaagtgcaacacagatcaggctggacgccccaaatgcccattggacccgtacttcatcatgcccgacaaatgcaaatgcgtggacttccagaccctgaagctgcaggagctgcctgatgcagtcccccacggggagatgcccagacacatgcagctctactgcgacaggtacctgtgtgacaaggtcgtccctgggaacagggttaccatcatgggcatctactccatcaagaagtttggcctgactaccagcaggggccgtgacagggtgggcgtgggcatccgaagctcctacatccgtgtcctgggcatccaggtggacacagatggctctggccgcagctttgctggggccgtgagcccccaggaggaggaggagttccgtcgcctggctgccctcccaaatgtctatgaggtcatctccaagagcatcgccccctccatctttgggggcacagacatgaagaaggccattgcctgcctgctctttgggggctcccgaaagaggctccctgatggacttactcgccgaggagacatcaacctgctgatgctaggggaccctgggacagccaagtcccagcttctgaagtttgtggagaagtgttctcccattggggtatacacgtctgggaaaggcagcagcgcagctggactgacagcctcggtgatgagggacccttcgtcccggaatttcatcatggagggcggagccatggtcctggccgatggtggggtcgtctgtattgacgagtttgacaagatgcgagaagatgaccgtgtggcaatccacgaagccatggagcagcagaccatctctatcgccaaggctgggatcaccaccaccctgaactcccgctgctccgtcctggctgctgccaactcagtgttcggccgctgggatgagacgaagggggaggacaacattgacttcatgcccaccatcttgtcgcgcttcgacatgatcttcatcgtcaaggatgagcacaatgaggtgagggatgtgatgctggccaagcatgtcatcactctgcacgtgagtgcactgacacagacacaggctgtggagggcgagattgacctggccaagctgaagaagtttattgcctactgccgagtgaagtgtggcccccggctgtcagcagaggctgcagagaaactgaagaaccgctacatcatcatgcggacggggcccgtcagcacgagagggacagtgaccgcgtccagcatccccatcactgtgcggcagttggaggccattgtgcgcatcgcggaagccctcagcaagatgaagctgcagcccttcgccacagaggcagatgtggaggaggccctgcggctcttccaagtgtccacgttggatgctgccttgtccggtaccctgtcaggggtggagggcttcaccagccaggaggaccaggagatgctgagccgcatcgagaagcagctcaagcgccgctttgccattggctcccaggtgtctgagcacagcatcatcaaggacttcaccaagcagaaatacccggagcacgccatccacaaggtgctgcagctcatgctgcggcgcggcgagatccagcatcgcatgcagcgcaaggttctctaccgcctcaagtgagtcgcgccgctcactggactcatggactcgccacgctcgccctccttgccgctgcctgccattgacaatgttgctgggacctctgcctccccactgcagccctcgaacttcccaggcaccctcctttctgccccagaggaaggagctgtagtgtcctgctgcctctgggcgcccgctctagcgggttctgggaagtgtgcttttggcatccgttaataataaagccacggtgtgttcaggt

SEQ ID NO: 151 - protein, 733 aa, Homo sapien
MSGFDDPGIFYSDSFGGDAQADEGQARKSQLQRRFKEFLRQYRVGTDRTGFTFKYRDELKRHYNLGEYWIEVEMEDLASFDEDLADYLYKQPAEHLQLLEEAAKEVADEVTRPRPSGEEVLQDIQVMLKSDASPSSIRSLKSDMMSHLVKIPGIIIAASAVRAKATRISIQCRSCRNTLTNIAMRPGLEGYALPRKCNTDQAGRPKCPLDPYFIMPDKCKCVDFQTLKLQELPDAVPHGEMPRHMQLYCDRYLCDKVVPGNRVTIMGIYSIKKFGLTTSRGRDRVGVGIRSSYIRVLGIQVDTDGSGRSFAGAVSPQEEEEFRRLAALPNVYEVISKSIAPSIFGGTDMKKAIACLLFGGSRKRLPDGLTRRGDINLLMLGDPGTAKSQLLKFVEKCSPIGVYTSGKGSSAAGLTASVMRDPSSRNFIMEGGAMVLADGGVVCIDEFDKMREDDRVAIHEAMEQQTISIAKAGITTTLNSRCSVLAAANSVFGRWDETKGEDNIDFMPTILSRFDMIFIVKDEHNEVRDVMLAKHVITLHVSALTQTQAVEGEIDLAKLKKFIAYCRVKCGPRLSAEAAEKLKNRYIIMRTGPVSTRGTVTASSIPITVRQLEAIVRIAEALSKMKLQPFATEADVEEALRLFQVSTLDAALSGTLSGVEGFTSQEDQEMLSRIEKQLKRRFAIGSQVSEHSIIKDFTKQKYPEHAIHKVLQLMLRRGEIQHRMQRKVLYRLK

SEQ ID NO: 152 - DNA, 2154 bp, Homo sapien
atataaccgcgtggcccgcgcgcgcgcttccctcccggcgcagtcaccggcgcggtctatggctgcgacttctctaatgtctgctttggctgcccggctgctgcagcccgcgcacagctgctcccttcgccttcgccctttccacctcgcggcagttcgaaatgaagctgttgtcatttctggaaggaaactggcccagcagatcaagcaggaagtgcggcaggaggtagaagagtgggtggcctcaggcaacaaacggccacacctgagtgtgatcctggttggcgagaatcctgcaagtcactcctatgtcctcaacaaaaccagggcagctgcagttgtgggaatcaacagtgagacaattatgaaaccagcttcaatttcagaggaagaattgttgaatttaatcaataaactgaataatgatgataatgtagatggcctccttgttcagttgcctcttccagagcatattgatgagagaaggatctgcaatgctgtttctccagacaaggatgttgatggctttcatgtaattaatgtaggacgaatgtgtttggatcagtattccatgttaccggctactccatggggtgtgtgggaaataatcaagcgaactggcattccaaccctagggaagaatgtggttgtggctggaaggtcaaaaaacgttggaatgcccattgcaatgttactgcacacagatggggcgcatgaacgtcccggaggtgatgccactgttacaatatctcatcgatatactcccaaagagcagttgaagaaacatacaattcttgcagatattgtaatatctgctgcaggtattccaaatctgatcacagcagatatgatcaaggaaggagcagcagtcattgatgtgggaataaatagagttcacgatcctgtaactgccaaacccaagttggttggagatgtggattttgaaggagtcagacaaaaagctgggtatatcactccagttcctggaggtgttggccccatgacagtggcaatgctaatgaagaataccattattgctgcaaaaaaggtgctgaggcttgaagagcgagaagtgctgaagtctaaagagcttggggtagccactaattaactactgtgtcttctgtgtcacaaacagcactccaggccagctcaagaagcaaagcaggccaatagaaatgcaatatttttaatttattctactgaaatggtttaaaatgatgccttgtatttattgaaagcttaaatgggtgggtgtttctgcacatacctctgcagtacctcaccagggagcattccagtatcatgcagggtcctgtgatctagccaggagcagccattaacctagtgattaatatgggagacattaccatatggaggatggatgcttcactttgtcaagcacctcagttacacattcgccttttctaggattgcatttcccaagtgctattgcaataacagttgatactcattttaggtaccagaccttttgagttcaactgatcaaaccaaaggaaaagtgttgctagagaaaattggggaaaaggtgaaaaagaaaaaatggtagtaattgagcagaaaaaaattaatttatatatgtattgattggcaaccagatttatctaagtagaactgaattggctaggaaaaaagaaaaactgcatgttaatcattttcctaagctgtccttttgaggcttagtcagtttattgggaaaatgtttaggattattccttgctattagtactcattttatgtatgttacccttcagtaagttctccccattttagttttctaggactgaaaggattcttttctacattatacatgtgtgttgtcatatttggcttttgctatatactttaacttcattgttaaatttttgtattgtatagtttctttggtgtatcttaaaacctatttttgaaaaacaaacttggcttgataatcatttgggcagcttgggtaagtacgcaacttacttttccaccaaagaactgtcagcagctgcctgcttttctgtgatgtatgtatcctgttgacttttccagaaattttttaagagtttgagttactattgaatttaatcagactttctgattaaagggttttctttcttttttaataaaacacatctgtctggtatggta

SEQ ID NO: 153 - protein, 344 aa, Homo sapien
MSALAARLLQPAHSCSLRLRPFHLAAVRNEAVVISGRKLAQQIKQEVRQEVEEWVASGNKRPHLSVILVGENPASHSYVLNKTRAAAVVGINSETIMKPASISEEELLNLINKLNNDDNVDGLLVQLPLPEHIDERRICNAVSPDKDVDGFHVINVGRMCLDQYSMLPATPWGVWEIIKRTGIPTLGKNVVVAGRSKNVGMPIAMLLHTDGAHERPGGDATVTISHRYTPKEQLKKHTILADIVISAAGIPNLITADMIKEGAAVIDVGINRVHDPVTAKPKLVGDVDFEGVRQKAGYITPVPGGVGPMTVAMLMKNTIIAAKKVLRLEEREVLKSKELGVATN

SEQ ID NO: 154 - DNA, 3236 bp, Homo sapien
ctccaccgcggcgagaggcatgggcacgtggctgccgagggtggccgagctctgggaagaaaagcccgtgtgcctctgcatagcgtcgctacagcgctgactcggtgtggattgattggaaaggtttgagggagtacttgggaagcatggtggcacatgatgagactggaggtctcctacctattaaaaggaccatacgagtcctagatgtcaataaccagtccttcagagaacaagaggagccaagcaataaaagagttcgacctctggctcgtgtcacgtccttggcaaatttaatctctcctgtaagaaatggagctgtcagacgttttggtcaaacaatacagtcatttacccttcgtggtgaccacagatccccagcctctgcccagaagttttctagcaggtcaacagtcccaacacccgccaagagaaggagcagtgcactgtggtcagagatgctggacatcaccatgaaggagtctctcaccaccagggagatcagacggcaggaggcaatatatgaaatgtcccgaggtgaacaggatttaattgaggatctcaaacttgcaagaaaggcctaccatgaccccatgttaaagttgtccatcatgtcagaagaggaactcacacatatatttggtgatctggactcttacatacctctgcatgaagatttgttgacaagaataggagaagcaaccaagcctgatggaacagtggagcagattggtcacattctcgtgagctggttaccgcgcttgaatgcctacagaggttactgtagtaaccagctggcagccaaagctcttcttgatcaaaagaaacaggatccaagagtccaagacttcctccagcgatgtctcgagtctcccttcagtcgaaaactagatctttggagtttcctagatatccctcgaagtcgcctagtcaaataccctttactgttaaaagaaattcttaaacacactccaaaagagcaccctgatgttcagcttctggaggatgctatattgataatacagggagtcctctctgatatcaacttgaagaaaggtgaatccgagtgccagtattacatcgacaagctggagtacctggatgaaaagcagagggaccccagaatcgaagcgagcaaagtgctgctgtgccatggggagctgcggagcaagagtggacataaactttacattttcctgtttcaagacatcttggttctgactcggcccgtcacacggaacgaacggcactcttaccaggtttaccggcagccaatcccagtccaagagctagtcctagaagacctgcaggatggagatgtgagaatgggaggctcctttcgaggagctttcagtaactcagagaaagctaaaaatatctttagaattcgcttccatgacccctctccagcccagtctcacactctgcaagccaatgacgtgttccacaagcagcagtggttcaactgtattcgagcggccattgcccccttccagtcggcaggcagtccacctgagctgcagggcctgccggagctgcacgaagagtgtgaggggaaccacccctctgcgaggaaactcacagcccagaggagggcatccacagtttccagtgttactcaggtagaagttgatgaaaacgcttacagatgtggctctggcatgcagatggcagaggacagcaagagcttaaagacacaccagacacagcccggcatccgaagagcgagggacaaagccctttctggtggcaaacggaaagagactttggtgtagagaaggctctgtgtgttaactgatgggagagactgtttgtttataaatgtgtacagttttgttttctcgtaaggggagcatcatagggttactttataccagttgtaacattttcattgtttttggttgttcttttttctttttttaatggcagctaaagatatacagattactgttaaattgcagtcctttttttttttaaagatattttcttgaattatttagaacatggtaagcctggtattttttaatcaaacaaaatatttatgaaatgggttttctcttaattctggattcatcatggctttctaataccaattgtaatatttacaatattcaccaaaacttagaattttgcaaatgctggaattctgccagtgtttctttgctaagccttgcatgcaaaatttgaaattttaacattggcacccaaaacctacatggaatgtatgtctggagtatttcaaactttacattgaaacataatttccttggaaaacaaaccataagcctgaggaggtttttatcaactggaatgctttatattagtttgtttttcactgtacattcctcattttacattcatttaacctgccgattatttaatttttttattgtaaagtagtttttagcatttgcttttatttttttactttgatgccttttcaaattggcatgtctttaaagtatttttcttcctgattaaaaatgtgtgtgtatgtgtgtgtgtgtgtgtatatatatatatttttttaaatcacattaattttaccaagtgaaaccaagccatactgtttttgagccaattaagaaaattgccatttttaaagtgtagcatttcagggtaaagacccatgaaatggcttgatgtattctagactactgaaagaaaaccacttcaaagattttgttgaaagttttagtgttgtctgaaatgcaagagggaaggtgattggtagtgagttaaaagaaaaagagaggaaaagagagtagttttgtcttcaagtaaaatgtctggttgtgccagacatttcacaagtgtgaaaggagataggagaagctcaacttgagggcgtgtagtaagttgtagaaggctcgaggggacgtggacttatttgccttggtttgcaatacctgcaaataatgagtttgaaaagaaacaatgaaatgtgttaaaaatttgaccatattagataaattttggtggatttagtcataagatggaaaaagactggtgaatcttttattacaaaatgtttctgttaaaatgggatcatcatctttgaaaggggggaggaggagtaaaagcccgattataatggtgatcaattcaagtcagtgttgactattctgtgaaatatatttggccagtggaaatgataatcagaaaagactgtaaatagatccatccaaatgatttctctgtacaaatgaatgatactattaaaaaaaaaaaaaaaa

SEQ ID NO: 155 - protein, 542 aa, Homo sapien
MVAHDETGGLLPIKRTIRVLDVNNQSFREQEEPSNKRVRPLARVTSLANLISPVRNGAVRRFGQTIQSFTLRGDHRSPASAQKFSSRSTVPTPAKRRSSALWSEMLDITMKESLTTREIRRQEAIYEMSRGEQDLIEDLKLARKAYHDPMLKLSIMSEEELTHIFGDLDSYIPLHEDLLTRIGEATKPDGTVEQIGHILVSWLPRLNAYRGYCSNQLAAKALLDQKKQDPRVQDFLQRCLESPFSRKLDLWSFLDIPRSRLVKYPLLLKEILKHTPKEHPDVQLLEDAILIIQGVLSDINLKKGESECQYYIDKLEYLDEKQRDPRIEASKVLLCHGELRSKSGHKLYIFLFQDILVLTRPVTRNERHSYQVYRQPIPVQELVLEDLQDGDVRMGGSFRGAFSNSEKAKNIFRIRFHDPSPAQSHTLQANDVFHKQQWFNCIRAAIAPFQSAGSPPELQGLPELHEECEGNHPSARKLTAQRRASTVSSVTQVEVDENAYRCGSGMQMAEDSKSLKTHQTQPGIRRARDKALSGGKRKETLV

SEQ ID NO: 156 - DNA, 3195 bp, Homo sapien
agaggcttccctggctggtgcctgagcccggcgtccctcgccccccgccctccccgcatccctctcctccctcgcgcctggccctgtggctcttcctccctccctccttccccccccccccacccctcgcccgctgcctccctcggcccagccagctgtgccggcgtttgttggctgccctgcgcccggccctccagccagccttctgccggccccgccgcgatggaggtgccccagccggagcccgcgccaggctcggctctcagtccagcaggcgtgtgcggtggcgcccagcgtccgggccacctcccgggcctcctgctgggatctcatggcctcctggggtccccggtgcgggcggccgcttcctcgccggtcaccaccctcacccagaccatgcacgacctcgccgggctcggcagccgcagccgcctgacgcacctatccctgtctcgacgggcatccgaatcctccctgtcgtctgaatcctccgaatcttctgatgcaggtctctgcatggattcccccagccctatggacccccacatggcggagcagacgtttgaacaggccatccaggcagccagccggatcattcgaaacgagcagtttgccatcagacgcttccagtctatgccggtgaggctgctgggccacagccccgtgcttcggaacatcaccaactcccaggcgcccgacggccggaggaagagcgaggcgggcagtggagctgccagcagctctggggaagacaaggagaatgtgcgcttctggaaggccggggtgggagctctccgggaagaggagggggcatgctggggtggttccctggcatgtgaggaccctcctctcccatcttggctgcaggatggatttgtcttcaagatgccatggaagcccacacatcccagctccacccatgctctggcagagtgggccagccgcagggaagcctttgcccagagacccagctcggcccccgacctgatgtgtctcagtcctgaccggaagatggaagtggaggagctcagccccctggccctaggtcgcttctctctgacccctgcagagggggatactgaggaagatgatggatttgtggacatcctagagagtgacttaaaggatgatgatgcagttcccccaggcatggagagtctcattagtgccccactggtcaagaccttggaaaaggaagaggaaaaggacctcgtcatgtacagcaagtgccagcggctcttccgctctccgtccatgccctgcagcgtgatccggcccatcctcaagaggctggagcggccccaggacagggacacgcccgtgcagaataagcggaggcggagcgtgacccctcctgaggagcagcaggaggctgaggaacctaaagcccgcgtcctccgctcaaaatcactgtgtcacgatgagatcgagaacctcctggacagtgaccaccgagagctgattggagattactctaaggccttcctcctacagacagtagacggaaagcaccaagacctcaagtacatctcaccagaaacgatggtggccctattgacgggcaagttcagcaacatcgtggataagtttgtgattgtagactgcagatacccctatgaatatgaaggcgggcacatcaagactgcggtgaacttgcccctggaacgcgacgccgagagcttcctactgaagagccccatcgcgccctgtagcctggacaagagagtcatcctcattttccactgtgaattctcatctgagcgtgggccccgcatgtgccgtttcatcagggaacgagaccgtgctgtcaacgactaccccagcctctactaccctgagatgtatatcctgaaaggcggctacaaggagttcttccctcagcacccgaacttctgtgaaccccaggactaccggcccatgaaccacgaggccttcaaggatgagctaaagaccttccgcctcaagactcgcagctgggctggggagcggagccggcgggagctctgtagccggctgcaggaccagtgaggggcctgcgccagtcctgctacctcccttgcctttcgaggcctgaagccagctgccctatgggcctgccgggctgagggcctgctggaggcctcaggtgctgtccatgggaaagatggtgtggtgtcctgcctgtctgccccagcccagattcccctgtgtcatcccatcattttccatatcctggtgccccccacccctggaagagcccagtctgttgagttagttaagttgggttaataccagcttaaaggcagtattttgtgtcctccaggagcttcttgtttccttgttagggttaacccttcatcttcctgtgtcctgaaacgctcctttgtgtgtgtgtcagctgaggctggggagagccgtggtccctgaggatgggtcagagctaaactccttcctggcctgagagtcagctctctgccctgtgtacttcccgggccagggctgcccctaatctctgtaggaaccgtggtatgtctgccatgttgcccctttctcttttcccctttcctgtcccaccatacgagcacctccagcctgaacagaagctcttactctttcctatttcagtgttacctgtgtgcttggtctgtttgactttacgcccatctcaggacacttccgtagactgtttaggttcccctgtcaaatatcagttacccactcggtcccagttttgttgccccagaaagggatgttattatccttgggggctcccagggcaagggttaaggcctgaatcatgagcctgctggaagcccagcccctactgctgtgaaccctggggcctgactgctcagaacttgctgctgtcttgttgcggatggatggaaggttggatggatgggtggatggccgtggatggccgtggatgcgcagtgccttgcatacccaaaccaggtgggagcgttttgttgagcatgacacctgcagcaggaatatatgtgtgcctatttgtgtggacaaaaatatttacacttagggtttggagctattcaagaggaaatgtcacagaagcagctaaaccaaggactgagcaccctctggattctgaatctcaagatgggggcagggctgtgcttgaaggccctgctgagtcatctgttagggccttggttcaataaagcactgagcaagttgagaaaaaaaaaaaaaaaaaaa

SEQ ID NO: 157 - protein, 601 aa, Homo sapien
MEVPQPEPAPGSALSPAGVCGGAQRPGHLPGLLLGSHGLLGSPVRAAASSPVTTLTQTMHDLAGLGSRSRLTHLSLSRRASESSLSSESSESSDAGLCMDSPSPMDPHMAEQTFEQAIQAASRIIRNEQFAIRRFQSMPVRLLGHSPVLRNITNSQAPDGRRKSEAGSGAASSSGEDKENVRFWKAGVGALREEEGACWGGSLACEDPPLPSWLQDGFVFKMPWKPTHPSSTHALAEWASRREAFAQRPSSAPDLMCLSPDRKMEVEELSPLALGRFSLTPAEGDTEEDDGFVDILESDLKDDDAVPPGMESLISAPLVKTLEKEEEKDLVMYSKCQRLFRSPSMPCSVIRPILKRLERPQDRDTPVQNKRRRSVTPPEEQQEAEEPKARVLRSKSLCHDEIENLLDSDHRELIGDYSKAFLLQTVDGKHQDLKYISPETMVALLTGKFSNIVDKFVIVDCRYPYEYEGGHIKTAVNLPLERDAESFLLKSPIAPCSLDKRVILIFHCEFSSERGPRMCRFIRERDRAVNDYPSLYYPEMYILKGGYKEFFPQHPNFCEPQDYRPMNHEAFKDELKTFRLKTRSWAGERSRRELCSRLQDQ

SEQ ID NO: 158 - DNA, 4064 bp, Homo sapien
ctgcggccgcctggtttcttgccttaaggagcccattgcctttcccgctgaagtctagatgttgacatgtaataaagcgggcagcaggatggtggtggatgcggccaactccaatgggcctttccagcccgtggtccttctccatattcgagatgttcctcctgctgatcaagagaagctttttatccagaagttacgtcagtgttgcgtcctctttgactttgtttctgatccactaagtgacctaaagtggaaggaagtaaaacgagctgctttaagtgaaatggtagaatatatcacccataatcggaatgtgatcacagagcctatttacccagaagtagtccatatgtttgcagttaacatgtttcgaacattaccaccttcctccaatcctacgggagcggaatttgacccggaggaagatgaaccaacgttagaagcagcctggcctcatctacagcttgtttatgaatttttcttaagatttttagagtctccagatttccaacctaatatagcgaagaaatatattgatcagaagtttgtattgcagcttttagagctctttgacagtgaagatcctcgggagagagattttcttaaaaccacccttcacagaatctatgggaaattcctaggcttgagagcttacatcagaaaacagataaataatatattttataggtttatttatgaaacagagcatcataatggcatagcagagttactggaaatattgggaagtataattaatggatttgccttaccactaaaagaagagcacaagattttcttattgaaggtgttactacctttgcacaaagtgaaatctctgagtgtctaccatccccagctggcatactgtgtagtgcagtttttagaaaaggacagcaccctcacggaaccagtggtgatggcacttctcaaatactggccaaagactcacagtccaaaagaagtaatgttcttaaacgaattagaagagattttagatgtcattgaaccatcagaatttgtgaagatcatggaacccctcttccggcagttggccaaatgtgtctccagcccacacttccaggtggcagagcgagctctctattactggaataatgaatacatcatgagtttaatcagtgacaacgcagcgaagattctgcccatcatgtttccttccttgtaccgcaactcaaagacccattggaacaagacaatacatggcttgatatacaacgccctgaagctcttcatggagatgaaccaaaagctatttgatgactgtacacaacagttcaaagcagagaaactaaaagagaagctaaaaatgaaagaacgggaagaagcatgggttaaaatagaaaatctagccaaagccaatccccagtacacagtgtatagtcaagccagcaccatgagcattccggttgcaatggagacagatgggcctttatttgaagatgtgcagatgctgagaaagacagtgaaggacgaggctcatcaggcacagaaagatccgaagaaggaccgtcctcttgcactccgcaagtccgagctgcctcaggacccccacaccaagaaagccttggaagctcactgcagggccgatgagctggcctcccaggacggccgctagcctccggggcgccgcgtcggggccgggcccgccagttcttttccggattctgtagaaaatacatacttcctgtgccataccaatcagttacactcaaagctttcttggaccccgttccgtaggcaataacgtgcgtccgcctcagcgcgagattaggagttcaaacaatggtgacttcccagagcccgctggcagagccgcgggttgacgacggtgtcctcgcagtgtcgccgccaccccagcgtagtccaagtcagactatttcacaaagtcagagcgataggaaagcaccctgcccttcatcttcatgttctcccaaatggaacttaggatcttttaacataggtggttctgtgataacatcagtgttttccaaatcaaaggaacgctttaaaaaataggacctattttttaagactttacagcctttgaaatggtttccacgtgattgttacgccagcagttcttttgtttgtttttcaatctcagtgaaatggctctttgctttcgagttctcacgcaacgtactgggcaaatgacaatcctcagccgctggtattttctaaggggtctcttcactttgatgagtgacatgaacaccgtgtctccttctcttgtgtgtacctaaagccatatttccaagtctgtggtactccaggattccaggagtaagcctgtagaagagatttattttaaaagagattgctctgaaatttatcttaaaagagcttgctctgtctaccttgacagaaattggagttttaaaattatgtgttaatatttttatttgcagatttcgtttccgtcaacttaaacattgttgcccttcaacaaggctcttgaattaataaaattatagtctctaagaattccacattttatggaaagttagagcaaaatcattttgagttaagccagttcttagcctaatgcaaactgcagcgcctttaagcataaagtaacacaacagcattgcacggggccggcactgccgctgccttcactgaaggctgcagtgctgttctgagagcttggaggaggcaccagcgaggatgacgtttagtggagctctttctgttgaaaagagctcacgttatcaacaccttgtaaggaaaatacagtgtctgagttttcatcggtcttcacatgctgctatatattccacagagttccttgcatgtactgagcttttgttttagatggaatagcacaaggagaaaaatctttaaacttagtgctttgtctattctttatttctctcagggtggccagtattttgacttatttatcctgcttgaaagctacttgagatgtgtactgctattctaaacacgtgatctagtttctttcatctctggcataagattatataacttaatgttaagtgtcttgaggcataaaagacaaaatgtggcttattttaggatctgttttttcatcgaggtctcgggtatcctttcaaagatagtgagaagcagacactgctccttgtgcagctctggtacctcctgcccactgctgtcacttcaagccactggcaatgcttctgtcctcgtgtcttggaggaaaatcacctggggggaggggacttcttgtggtaagagcaagtgcaggtatgaaatgcgaagattgccccagctaaaagtggacaagtccgctttgtgagatgaatacttcctgagaaacttgacaagtatctctccattttaccattatgaaaactatcattaaaaaaaacagtttagatgccttctccttttgagggaaaaagggtgctttttattgtataaagcagcgtcttatgtattttgatataccattgtttgaacttccgtctttagctgatagattctcaaatatccttgattttggatgttcagtatgtttgtgagagaggtttctgggaagactctctttttgccctcgggaaaaagcaaaatatcaatgtttgggtgactgtgtaaagctcagtgtgtaagaacatctttttgtctaggttttctttctgctctttattgaagacaaacactcaccaaaaagaaaaataaaagttttcagagaaactaattttctttggcaagagtattacttaatattttggcctcctaaagtttccctagttagtactcggactcctgtgctaattgtcagcttacatatcattgtatagagactgtttattctgtaccaaactgatttcaaaagtactacattgaaaataaaccggtgactgtttttcttcataaagttctgcgtttggcatcttcactctttccaaaatgtatctgtacatcagaaatgtcactattccaagtgtctttttagtgtggcctttagtatggcttccttttaatattgtacatacattgtatctttgttttatggtaataagtaataaaaatgtagacttcaaaaaaaaaagcggccgcag

SEQ ID NO: 159 - protein, 514 aa, Homo sapien [sequence omitted]

SEQ ID NO: 160 - DNA, 2475 bp, Homo sapien
ccggaggagtccgagaggaagcggaggcgcgagctggaggcggcggctcccgtcggcctccggcaggactgagcgctgggaggccggaaggcgggcgcgcacggcggagaggcgggcgggaggccggagcatattaatgaaaagtgccataaactgaaaaaccaaacatgagggtagcaggtgctgcaaagttggtggtagctgtggcagtgtttttactgacattttatgttatttctcaagtatttgaaataaaaatggatgcaagtttaggaaatctatttgcaagatcagcattggacacagctgcacgttctacaaagcctcccagatataagtgtgggatctcaaaagcttgccctgagaagcattttgcttttaaaatggcaagtggagcagccaacgtggtgggacccaaaatctgcctggaagataatgttttaatgagtggtgttaagaataatgttggaagagggatcaatgttgccttggcaaatggaaaaacaggagaagtattagacactaaatattttgacatgtggggaggagatgtggcaccatttattgagtttctgaaggccatacaagatggaacaatagttttaatgggaacatacgatgatggagcaaccaaactcaatgatgaggcacggcggctcattgctgatttggggagcacatctattactaatcttggttttagagacaactgggtcttctgtggtgggaagggcattaagacaaaaagcccttttgaacagcacataaagaacaataaggatacaaacaaatatgaaggatggcctgaagttgtagaaatggaaggatgcatcccccagaagcaagactaatggaaatgtggagagaattgaagaaagcgcactttcactcttaatgggagagctataaatggcagagctatgtgtaaatattttaagagcatgcagccatcttggtgtgtgcatgagtattgtctcttttgatatcaggattatttattgctaacgtaaatagatagcattgtaaataatcatcacaatgatcaaatcactgaaccatgtctccgcacatttccctaaaagtacaatgtttagactgctatggtaatacatattttaaattctaaaagcatacacaatgtgtaactgaatggtttgtgaaaaatatattgatatatatactagttgctatgaaaatatcatggaataatagggattttagggtggatactttattttcttttatgtttctatatgttgcgttgtgatgacattatcttttaaattaaaaagagatttggctagttgtgtgtgtaatgttactttacagtccgactctcctgatgtacctcttttcatgatctttttctttccttcccaagaaactgaggaatgtttaatatgaaaacatacatcggatatgtgaaaagcacaacaaaattcttaatgtacacagtaaaaaagtaaatatataaatgtagatggcatttaggaccacagcttgctggatttgtgttagctatgggaataacttgattttgtataagctatttagagtgaggctggaggtggcagcttcacagaactggagaaccaggccaagtcccctccccaacctaattaggtcattcaggacagctaagtcagtatatttagagcaatactagcatacgtttttcttaattgttatcagcattgaccaagtggtttggaaggaggcatgctttaatatcacaataattttgatttgtaaaccaagaaattaatcctgtgtttatctaacttcataatagcaattattgcccgaagctatagtggcatatttacaaaagttcttattactgggcggactgataacatttaaaaaataattgtgtttgaccccaaatgactttatacccaattctacataaaaatatagaagatctatctttttttgttaccttcagatgttcactaaataactcagtttttaagcagaagttttcagggcattaaatatatgttgtgtatgaagtatctcaaactggaacataaatttagtgatcaaactgccattcacagtgtaaggcagcacttaaatttcgaacctaaagtttagatgcattgtataaaaaaacctaaaagcagtatctgttatttagctgtaaaccaagttggaagctattcggataatttcttaaatattgatgaactttggagtactgtttcttccttcaaactgaatgtaattaattcatgaataaatgcaccttatatgtttaaacaatctttgtatacttttgggatttttggtgcttatatgctaaatcacattcagcatgtgtattttgacatttaaaatacttccctcaattctgtaaattaaaagaatagttattttacagttccagggattgtgaaataaatgttgcagttttttaaaataatgaaaataaatactcttggttttgctttgtgaaaaaaaaaaaaaaaa

SEQ ID NO: 161 - protein, 227 aa, Homo sapien
MRVAGAAKLVVAVAVFLLTFYVISQVFEIKMDASLGNLFARSALDTAARSTKPPRYKCGISKACPEKHFAFKMASGAANVVGPKICLEDNVLMSGVKNNVGRGINVALANGKTGEVLDTKYFDMWGGDVAPFIEFLKAIQDGTIVLMGTYDDGATKLNDEARRLIADLGSTSITNLGFRDNWVFCGGKGIKTKSPFEQHIKNNKDTNKYEGWPEVVEMEGCIPQKQD

SEQ ID NO: 162 - DNA, 3393 bp, Homo sapien
cccaggcgcagccaatgggaagggtcggaggcatggcacagccaatgggaagggccggggcaccaaagccaatgggaagggccgggagcgcgcggcgcgggagatttaaaggctgctggagtgaggggtcgcccgtgcaccctgtcccagccgtcctgtcctggctgctcgctctgcttcgctgcgcctccactatgctctccctccgtgtcccgctcgcgcccatcacggacccgcagcagctgcagctctcgccgctgaaggggctcagcttggtcgacaaggagaacacgccgccggccctgagcgggacccgcgtcctggccagcaagaccgcgaggaggatcttccaggagcccacggagccgaaaactaaagcagctgcccccggcgtggaggatgagccgctgctgagagaaaacccccgccgctttgtcatcttccccatcgagtaccatgatatctggcagatgtataagaaggcagaggcttccttttggaccgccgaggaggttgacctctccaaggacattcagcactgggaatccctgaaacccgaggagagatattttatatcccatgttctggctttctttgcagcaagcgatggcatagtaaatgaaaacttggtggagcgatttagccaagaagttcagattacagaagcccgctgtttctatggcttccaaattgccatggaaaacatacattctgaaatgtatagtcttcttattgacacttacataaaagatcccaaagaaagggaatttctcttcaatgccattgaaacgatgccttgtgtcaagaagaaggcagactgggccttgcgctggattggggacaaagaggctacctatggtgaacgtgttgtagcctttgctgcagtggaaggcattttcttttccggttcttttgcgtcgatattctggctcaagaaacgaggactgatgcctggcctcacattttctaatgaacttattagcagagatgagggtttacactgtgattttgcttgcctgatgttcaaacacctggtacacaaaccatcggaggagagagtaagagaaataattatcaatgctgttcggatagaacaggagttcctcactgaggccttgcctgtgaagctcattgggatgaattgcactctaatgaagcaatacattgagtttgtggcagacagacttatgctggaactgggttttagcaaggttttcagagtagagaacccatttgactttatggagaatatttcactggaaggaaagactaacttctttgagaagagagtaggcgagtatcagaggatgggagtgatgtcaagtccaacagagaattcttttaccttggatgctgacttctaaatgaactgaagatgtgcccttacttggctgattttttttttccatctcataagaaaaatcagctgaagtgttaccaactagccacaccatgaattgtccgtaatgttcattaacagcatctttaaaactgtgtagctacctcacaaccagtcctgtctgtttatagtgctggtagtatcaccttttgccagaaggcctggctggctgtgacttaccatagcagtgacaatggcagtcttggctttaaagtgaggggtgaccctttagtgagcttagcacagcgggattaaacagtcctttaaccagcacagccagttaaaagatgcagcctcactgcttcaacgcagattttaatgtttacttaaatataaacctggcactttacaaacaaataaacattgttttgtactcacggcggcgataatagcttgatttatttggtttctacaccaaatacattctcctgaccactaatgggagccaattcacaattcactaagtgactaaagtaagttaaacttgtgtagactaagcatgtaatttttaagttttattttaatgaattaaaatatttgttaaccaactttaaagtcagtcctgtgtatacctagatattagtcagttggtgccagatagaagacaggttgtgtttttatcctgtggcttgtgtagtgtcctgggattctctgccccctctgagtagagtgttgtgggataaaggaatctctcagggcaaggagcttcttaagttaaatcactagaaatttaggggtgatctgggccttcatatgtgtgagaagccgtttcattttatttctcactgtattttcctcaacgtctggttgatgagaaaaaattcttgaagagttttcatatgtgggagctaaggtagtattgtaaaatttcaagtcatccttaaacaaaatgatccacctaagatcttgcccctgttaagtggtgaaatcaactagaggtggttcctacaagttgttcattctagttttgtttggtgtaagtaggttgtgtgagttaattcatttatatttactatgtctgttaaatcagaaattttttattatctatgttcttctagattttacctgtagttcatacttcagtcacccagtgtcttattctggcattgtctaaatctgagcattgtctagggggatcttaaactttagtaggaaaccatgagctgttaatacagtttccattcaaatattaatttcagaatgaaacataattttttttttttttttgagatggagtctcgctctgttgcccaggctggagtgcagtggcgcgattttggctcactgtaacctccatctcctgggttcaagcaattctcctgtctcagcctccctagtagctgggactgcaggtatgtgctaccacacctggctaatttttgtatttttagtagagatggagtttcaccatattggtcaggctggtcttgaactcctgacctcaggtgatccacccacctcggcctcccaaagtgctggggattgcaggcgtgataaacaaatattcttaatagggctactttgaattaatctgcctttatgtttgggagaagaaagctgagacattgcatgaaagatgatgagagataaatgttgatcttttggccccatttgttaattgtattcagtatttgaacgtcgtcctgtttattgttagttttcttcatcatttattgtatagacaatttttaaatctctgtaatatgatacattttcctatcttttaagttattgttacctaaagttaatccagattatatggtccttatatgtgtacaacattaaaatgaaaggctttgtcttgcattgtgaggtacaggcggaagttggaatcaggttttaggattctgtctctcattagctgaataatgtgaggattaacttctgccagctcagaccatttcctaatcagttgaaagggaaacaagtatttcagtctcaaaattgaataatgcacaagtcttaagtgattaaaataaaactgttcttatgtc

SEQ ID NO: 163 - protein, 389 aa, Homo sapien
MLSLRVPLAPITDPQQLQLSPLKGLSLVDKENTPPALSGTRVLASKTARRIFQEPTEPKTKAAAPGVEDEPLLRENPRRFVIFPIEYHDIWQMYKKAEASFWTAEEVDLSKDIQHWESLKPEERYFISHVLAFFAASDGIVNENLVERFSQEVQITEARCFYGFQIAMENIHSEMYSLLIDTYIKDPKEREFLFNAIETMPCVKKKADWALRWIGDKEATYGERVVAFAAVEGIFFSGSFASIFWLKKRGLMPGLTFSNELISRDEGLHCDFACLMFKHLVHKPSEERVREIIINAVRIEQEFLTEALPVKLIGMNCTLMKQYIEFVADRLMLELGFSKVFRVENPFDFMENISLEGKTNFFEKRVGEYQRMGVMSSPTENSFTLDADF

SEQ ID NO: 164 - DNA, 1654 bp, Homo sapien
gaattcgggcggtcctcggagacacgcggcggtgtcctgtgttggccatggccgactacctgattagtgggggcacgtcctacgtgccagacgacggactcacagcacagcagctcttcaactgcggagacggcctcacctacaatgactttctcattctccctgggtacatcgacttcactgcagaccaggtggacctgacttctgctctgaccaagaaaatcactcttaagaccccactggtttcctctcccatggacacagtcacagaggctgggatggccatagcaatggcgcttacaggcggtattggcttcatccaccacaactgtacacctgaattccaggccaatgaagttcggaaagtgaagaaatatgaacagggattcatcacagaccctgtggtcctcagccccaaggatcgcgtgcgggatgtttttgaggccaaggcccggcatggtttctgcggtatcccaatcacagacacaggccggatggggagccgcttggtgggcatcatctcctccagggacattgattttctcaaagaggaggaacatgactgtttcttggaagagataatgacaaagagggaagacttggtggtagccccccgcagcatcacactgaaggaggcaaatgaaattctgcagcgcagcaagaagggaaagttgcccattgtaaatgaagatgatgagcttgtggccatcattgcccggacagacctgaagaagaatcgggactacccactagcctccaaagatgccaagaaacagctgctgtgtggggcagccattggcactcatgaggatgacaagtataggctggacttgctcgcccaggctggtgtggatgtagtggttttggactcttcccagggaaattccatcttccagatcaatatgatcaagtacatcaaagacaaataccctaatctccaagtcattggaggcaatgtggtcactgctgcccaggccaagaacctcattgatgcaggtgtggatgccctgcgggtgggcatgggaagtggctccatctgcattacgcaggaagtgctggcctgtgggcggccccaagcaacagcagtgtacaaggtgtcagagtatgcacggcgctttggtgttccggtcattgctgatggaggaatccaaaatgtgggtcatattgcgaaagccttggcccttggggcctccacagtcatgatgggctctctcctggctgccaccactgaggcccctggtgaatacttcttttccgatgggatccggctaaagaaatatcgcggtatgggttctctcgatgccatggacaagcacctcagcagccagaacagatatttcagtgaagctgacaaaatcaaagtggcccagggagtgtctggtgctgtgcaggacaaagggtcaatccacaaatttgtcccttacctgattgctggcatccaacactcatgccaggacattggtgccaagagcttgacccaagtccgagccatgatgtactctggggagcttaagtttgagaagagaacgtcctcagcccaggtggaaggtggcgtccatagcctccattcgtatgagaagcggcttttctgaaaagggatccagcacacctcctcggtttttttttcaataaaagtttagaaagacccgaattc

SEQ ID NO: 165 - protein, 514 aa, Homo sapien
MADYLISGGTSYVPDDGLTAQQLFNCGDGLTYNDFLILPGYIDFTADQVDLTSALTKKITLKTPLVSSPMDTVTEAGMAIAMALTGGIGFIHHNCTPEFQANEVRKVKKYEQGFITDPVVLSPKDRVRDVFEAKARHGFCGIPITDTGRMGSRLVGIISSRDIDFLKEEEHDCFLEEIMTKREDLVVAPRSITLKEANEILQRSKKGKLPIVNEDDELVAIIARTDLKKNRDYPLASKDAKKQLLCGAAIGTHEDDKYRLDLLAQAGVDVVVLDSSQGNSIFQINMIKYIKDKYPNLQVIGGNVVTAAQAKNLIDAGVDALRVGMGSGSICITQEVLACGRPQATAVYKVSEYARRFGVPVIADGGIQNVGHIAKALALGASTVMMGSLLAATTEAPGEYFFSDGIRLKKYRGMGSLDAMDKHLSSQNRYFSEADKIKVAQGVSGAVQDKGSIHKFVPYLIAGIQHSCQDIGAKSLTQVRAMMYSGELKFEKRTSSAQVEGGVHSLHSYEKRLF

SEQ ID NO: 166 - DNA, 717 bp, Mus musculus
agagcgatcatgtcgcacaaacaaatttactattcggacaaatacgacgacgaggagtttgagtatcgacatgtcatgctgcccaaggacatagccaagctggtccctaaaacccatctgatgtctgaatctgaatggaggaatcttggcgttcagcagagtcagggatgggtccattatatgatccatgaaccagaacctcacatcttgctgttccggcgcccactacccaagaaaccaaagaaatgaagctggcaagctacttttcagcctcaagctttacacagctgtccttacttcctaacatctttctgataacattattatgttgccttcttgtttctcactttgatatttaaaagatgttcaatacactgtttgaatgtgctggtaactgctttgcttcttgagtagagccaccaccaccatagcccagccagatgagtgctctgtggacccacagcctaagctgagtgtgaccccagaagccacgatgtgctctgtatccagaacacacttggcagatggaggaagcatctgagtttgagaccatggctgttacagggatcatgtaaacttgctgtttttgttttttctgccgggtgttgtatgtgtggtgacttgcggatttatgtttcagtgtactggaaactttccattttattcaagaaatctgttcatgttaaaagccttgattaaagaggaagtttttataat

SEQ ID NO: 167 - protein, 79 aa, Mus musculus [sequence omitted]

SEQ ID NO: 168 - DNA, 921 bp, Homo sapien
gcggcgctcgcgccaagggacgtgtttctgcgctcgcgtggtcatggaggcgctgccgctgctagccgcgacaactccggaccacggccgccaccgaaggctgcttctgctgccgctactgctgttcctgctgccggctggagctgtgcagggctgggagacagaggagaggccccggactcgcgaagaggagtgccacttctacgcgggtggacaagtgtacccgggagaggcatcccgggtatcggtcgccgaccactccctgcacctaagcaaagcgaagatttccaagccagcgccctactgggaaggaacagctgtgatcgatggagaatttaaggagctgaagttaactgattatcgtgggaaatacttggttttcttcttctacccacttgatttcacatttgtgtgtccaactgaaattatcgcttttggcgacagacttgaagaattcagatctataaatactgaagtggtagcatgctctgttgattcacagtttacccatttggcctggattaatacccctcgaagacaaggaggacttgggccaataaggattccacttctttcagatttgacccatcagatctcaaaggactatggtgtatacctagaggactcaggccacactcttagaggtctcttcattattgatgacaaaggaatcctaagacaaattactctgaatgatcttcctgtgggtagatcagtggatgagacactacgtttggttcaagcattccagtacactgacaaacacggagaagtctgccctgctggctggaaacctggtagtgaaacaataatcccagatccagctggaaagctgaagtatttcgataaactgaattgagaaatacttcttcaagttatgatgcttgaaagttctcaataaagttcacggtttcattacca

SEQ ID NO: 169 - protein, 271 aa, Homo sapien
MEALPLLAATTPDHGRHRRLLLLPLLLFLLPAGAVQGWETEERPRTREEECHFYAGGQVYPGEASRVSVADHSLHLSKAKISKPAPYWEGTAVIDGEFKELKLTDYRGKYLVFFFYPLDFTFVCPTEIIAFGDRLEEFRSINTEVVACSVDSQFTHLAWINTPRRQGGLGPIRIPLLSDLTHQISKDYGVYLEDSGHTLRGLFIIDDKGILRQITLNDLPVGRSVDETLRLVQAFQYTDKHGEVCPAGWKPGSETIIPDPAGKLKYFDKLN

SEQ ID NO: 170 - DNA, 2917 bp, Homo sapien
ggaaaaaagcgacttgtggcggtcgagcgtggcgcaggcgaatcctcggcactaagcaaatatggacctcgcggcggcagcggagccgggcgccggcagccagcacctggaggtccgcgacgaggtggccgagaagtgccagaaactgttcctggacttcttggaggagtttcagagcagcgatggagaaattaaatacttgcaattagcagaggaactgattcgtcctgagagaaacacattggttgtgagttttgtggacctggaacaatttaaccagcaactttccaccaccattcaagaggagttctatagagtttacccttacctgtgtcgggccttgaaaacattcgtcaaagaccgtaaagagatccctcttgccaaggatttttatgttgcattccaagacctgcctaccagacacaagattcgagagctcacctcatccagaattggtttgctcactcgcatcagtgggcaggtggtgcggactcacccagttcacccagagcttgtgagcggaacttttctgtgcttggactgtcagacagtgatcagggatgtagaacagcagttcaaatacacacagccaaacatctgccgaaatccagtttgtgccaacaggaggagattcttactggatacaaataaatcaagatttgttgattttcaaaaggttcgtattcaagagacccaagctgagcttcctcgagggagtatcccccgcagtttagaagtaattttaagggctgaagctgtggaatcagctcaagctggtgacaagtgtgactttacagggacactgattgttgtgcctgacgtctccaagcttagcacaccaggagcacgtgcagaaactaattcccgtgtcagtggtgttgatggatatgagacagaaggcattcgaggactccgggcccttggtgttagggacctttcttataggctggtctttcttgcctgctgtgttgcgccaaccaacccaaggtttggggggaaagagctcagagatgaggaacagacagctgagagcattaagaaccaaatgactgtgaaagaatgggagaaagtgtttgagatgagtcaagataaaaatctataccacaatctttgtaccagcctgttccctactatacatggcaatgatgaagtaaaacggggtgtcctgctgatgctctttggtggcgttccaaagacaacaggagaagggacctctcttcgaggggacataaatgtttgcattgttggtgacccaagtacagctaagagccaatttctcaagcacgtggaggagttcagccccagagctgtctacaccagtggtaaagcgtccagtgctgctggcttaacagcagctgttgtgagagatgaagaatctcatgagtttgtcattgaggctggagctttgatgttggctgataatggtgtgtgttgtattgatgaatttgataagatggacgtgcgggatcaagttgctattcatgaagctatggaacagcagaccatatccatcactaaagcaggagtgaaggctactctgaacgcccggacgtccattttggcagcagcaaacccaatcagtggacactatgacagatcaaaatcattgaaacagaatataaatttgtcagctcccatcatgtcccgattcgatctcttctttatccttgtggatgaatgtaatgaggttacagattatgccattgccaggcgcatagtagatttgcattcaagaattgaggaatcaattgatcgtgtctattccctcgatgatatcagaagatatcttctctttgcaagacagtttaaacccaagatttccaaagagtcagaggacttcattgtggagcaatataaacatctccgccagagagatggttctggagtgaccaagtcttcatggaggattacagtgcgacagcttgagagcatgattcgtctctctgaagctatggctcggatgcactgctgtgatgaggtccaacctaaacatgtgaaggaagctttccggttactgaataaatcaatcatccgtgtggaaacacctgatgtcaatctagatcaagaggaagagatccagatggaggtagatgagggtgctggtggcatcaatggtcatgctgacagccctgctcctgtgaacgggatcaatggctacaatgaagacataaatcaagagtctgctcccaaagcctccttaaggctgggcttctctgagtactgccgaatctctaaccttattgtgcttcacctcagaaaggtggaagaagaagaggacgagtcagcattaaagaggagcgagcttgttaactggtacttgaaggaaatcgaatcagagatagactctgaagaagaacttataaataaaaaaagaatcatagagaaagttattcatcgactcacacactatgatcatgttctaattgagctcacccaggctggattgaaaggctccacagagggaagtgagagctatgaagaagatccctacttggtagttaaccctaactacttgctcgaagattgagatagtgaaagtaactgaccagagctgaggaactgtggcacagcacctcgtggcctggagcctggctggagctctgctagggacagaagtgtttctggaagtgatgcttccaggatttgttttcagaaacaagaattgagttgatggtcctatgtgtcacattcatcacaggtttcataccaacacaggcttcagcacttcctttggtgtgtttcctgtcccagtgaagttggaaccaaataatgtgtagtctctataaccaatacctttgttttcatgtgtaagaaaaggcccattacttttaaggtatgtgctgtcctattgagcaaataactttttttcaattgccagctactgcttttattcatcaaaataaaataacttgttctg

SEQ ID NO: 171 - protein, 821 aa, Homo sapien
MDLAAAAEPGAGSQHLEVRDEVAEKCQKLFLDFLEEFQSSDGEIKYLQLAEELIRPERNTLVVSFVDLEQFNQQLSTTIQEEFYRVYPYLCRALKTFVKDRKEIPLAKDFYVAFQDLPTRHKIRELTSSRIGLLTRISGQVVRTHPVHPELVSGTFLCLDCQTVIRDVEQQFKYTQPNICRNPVCANRRRFLLDTNKSRFVDFQKVRIQETQAELPRGSIPRSLEVILRAEAVESAQAGDKCDFTGTLIVVPDVSKLSTPGARAETNSRVSGVDGYETEGIRGLRALGVRDLSYRLVFLACCVAPTNPRFGGKELRDEEQTAESIKNQMTVKEWEKVFEMSQDKNLYHNLCTSLFPTIHGNDEVKRGVLLMLFGGVPKTTGEGTSLRGDINVCIVGDPSTAKSQFLKHVEEFSPRAVYTSGKASSAAGLTAAVVRDEESHEFVIEAGALMLADNGVCCIDEFDKMDVRDQVAIHEAMEQQTISITKAGVKATLNARTSILAAANPISGHYDRSKSLKQNINLSAPIMSRFDLFFILVDECNEVTDYAIARRIVDLHSRIEESIDRVYSLDDIRRYLLFARQFKPKISKESEDFIVEQYKHLRQRDGSGVTKSSWRITVRQLESMIRLSEAMARMHCCDEVQPKHVKEAFRLLNKSIIRVETPDVNLDQEEEIQMEVDEGAGGINGHADSPAPVNGINGYNEDINQESAPKASLRLGFSEYCRISNLIVLHLRKVEEEEDESALKRSELVNWYLKEIESEIDSEEELINKKRIIEKVIHRLTHYDHVLIELTQAGLKGSTEGSESYEEDPYLVVNPNYLLED

SEQ ID NO: 172 - DNA, 1935 bp, Homo sapien
ctggtcccgagcacgagctgtgaggggattcacttgtgtgcggaactcctcggaaccatggcgtccctttcccttgcacctgttaacatctttaaggcaggagctgatgaagagagagcagagacagctcgtctgacttcttttattggtgccatcgccattggagacttggtaaagagcaccttgggacccaaaggcatggacaaaattcttctaagcagtggacgagatgcctctcttatggtaaccaatgatggtgccactattctaaaaaacattggtgttgacaatccagcagctaaagttttagttgatatgtcaagggttcaagatgatgaagttggtgatggcactacctctgttaccgttttagcagcagaattattaagggaagcagaatctttaattgcaaaaaagattcatccacagaccatcatagcgggttggagagaagccacgaaggctgcaagagaggcgctgttgagttctgcagttgatcatggttccgatgaagttaaattccgtcaagatttaatgaatattgcgggcacaacattatcctcaaaacttcttactcatcacaaagaccactttacaaagttagctgtagaagcagttctcagactgaaaggctctggcaacctggaggcaattcatattatcaagaagctaggaggaagtttggcagattcctatttagatgaaggcttcctgttggataaaaaaattggagtaaatcaaccaaaacgaattgaaaatgctaaaattcttattgcaaatactggtatggatacagacaaaataaagatatttggttcccgggtaagagttgactctacagcaaaggttgcagaaatagaacatgcggaaaaggaaaaaatgaaggagaaagttgaacgtattcttaagcatggaataaattgctttattaacaggcaattaatttataattatcctgaacagctctttggtgctgctggtgtcatggctattgagcatgcagattttgcaggtgtggaacgcctagctcttgtcacaggtggtgaaattgcctctacctttgatcacccagaactggtgaagcttggaagttgcaaacttatcgaggaagtcatgattggagaagacaaactcattcacttttctggggttgcccttggtgaggcttgtaccattgttttgcgtggtgccactcaacaaattttagatgaagcagaaagatcattgcatgatgctctttgtgttcttgcgcaaactgtaaaggactctagaacagtttatggaggaggctgttctgagatgttgatggctcatgctgtgacacagcttgccaatagaacaccaggcaaagaagctgttgcaatggagtcttatgctaaagcactgagaatgttgccaaccatcatagctgacaatgcaggctatgacagtgcagacctggtggcacagctcagggctgctcacagtgaaggcaataccactgctggattggatatgagggaaggcaccattggagatatggctatcctgggtataacagaaagttttcaagtgaagcgacaggttcttctgagtgcagctgaagcagcagaggtgattctgcgtgtggacaacatcatcaaagcggcacccaggaaacgtgtccctgatcaccacccctgttaagcattcccacgtgctgtcgatctttggaccagtttctagcaaagttgtgtttgaaagatactctattaaagaagactgtggaatctgtttatcggtgcccattatatccttaagtttggatatttagctgaccttcgctttaacataggtctaatttatttgccgtgtcattttccatacaaatcagttgatttaaaggagttcatttcgcatactgggcattaaaataaaaatttgaacaatgaaaggaaaaaaaggagaaaaaaaaaa

SEQ ID NO: 173 - protein, 535 aa, Homo sapien
MASLSLAPVNIFKAGADEERAETARLTSFIGAIAIGDLVKSTLGPKGMDKILLSSGRDASLMVTNDGATILKNIGVDNPAAKVLVDMSRVQDDEVGDGTTSVTVLAAELLREAESLIAKKIHPQTIIAGWREATKAAREALLSSAVDHGSDEVKFRQDLMNIAGTTLSSKLLTHHKDHFTKLAVEAVLRLKGSGNLEAIHIIKKLGGSLADSYLDEGFLLDKKIGVNQPKRIENAKILIANTGMDTDKIKIFGSRVRVDSTAKVAEIEHAEKEKMKEKVERILKHGINCFINRQLIYNYPEQLFGAAGVMAIEHADFAGVERLALVTGGEIASTFDHPELVKLGSCKLIEEVMIGEDKLIHFSGVALGEACTIVLRGATQQILDEAERSLHDALCVLAQTVKDSRTVYGGGCSEMLMAHAVTQLANRTPGKEAVAMESYAKALRMLPTIIADNAGYDSADLVAQLRAAHSEGNTTAGLDMREGTIGDMAILGITESFQVKRQVLLSAAEAAEVILRVDNIIKAAPRKRVPDHHPC

SEQ ID NO: 174 - DNA, 2561 bp, Homo sapien
gcctgagtgagtctctggcgtcccaaattgcctgtttttctcgcaggctctattccgttcgctggttcgccacctcaggggaacgatggccatggagtccacagccactgccgccgtcgccgcggacgtggtttctgccgacaaaattgaagatgtccctgctccttctacatctgcagataaagtggagagtctggatgtggatagtgaagctaagaaactattgggtttaggacagaaacatctggtgatgggggatattccagcagctgtcaatgcattccaggaagcagctagtcttttaggtaagaagtatggagagacagctaatgagtgtggagaagccttctttttctatgggaaatcacttctggagttggcaagaatggagaatggtgtgttgggaaacgccttggaaggtgtgcatgtggaagaggaagaaggagaaaaaacagaagatgaatctctggtagaaaataatgataacatagatgaggaagcaagggaagagttgagagaacaggtttatgacgccatgggagaaaaagaagaagccaaaaaaacagaagacaagtctttggcaaagcctgaaactgataaagaacaggacagtgaaatggagaagggtggaagagaagatatggatataagtaaatctgcagaggagccacaggaaaaagttgacttgactctagattggttaactgaaacctctgaagaggcaaaaggaggagcagcaccagaaggaccgaatgaagctgaggtcacttctgggaagccagaacaggaagtaccagatgctgaggaagaaaaatcagtttctggaactgatgtccaagaagagtgcagagaaaaaggaggtcaggagaagcagggagaggtaattgtgagcatagaggagaagccaaaagaagtttcagaagagcagcctgtggtgactctagaaaagcagggcactgcagtggaggtagaagcagagtctttagacccgacagtcaagccagtggatgtgggtggggacgagccagaggagaaggtagttacctctgaaaacgaggcaggaaaggcggttcttgaacaactggtaggtcaagaagtaccacctgctgaagagtcaccagaggtgcaaacagaggctgcagaggcctcagctgtagaggctggatcagaagtctctgaaaagcctgggcaggaggctccagttctccctaaggatggtgcagtcaatggaccgtcagttgtaggagatcagactcctattgaaccacagacttctatagaaagactgacagaaacaaaagatggctcaggactagaggagaaggtcagggcaaagctggttcctagtcaggaggagactaagctgtctgtagaagagtctgaggcagctggagatggggttgataccaaggtagcccagggagctactgagaaatcacctgaagacaaagttcagatagctgctaatgaagagacacaagagagagaagaacagatgaaagagggtgaagaaactgaaggctcggaagaggatgataaagaaaatgataagactgaagaaatgccaaatgattcagtccttgaaaacaagtctcttcaagaaaatgaggaggaggagattgggaacctagagcttgcctgggatatgctggatttagcaaagatcatttttaaaaggcaagaaacaaaagaagcacagctttatgctgcccaggcacatcttaaactcggagaagttagtgttgaatctgaaaactatgtgcaagctgtggaggagttccagtcctgccttaacctgcaggaacagtacctggaagcccacgaccgtctgcttgcagagacccactaccagctgggcttggcttatgggtacaactctcagtatgatgaggcagtggcacagttcagcaaatctattgaagtcattgagaacagaatggctgtactaaacgagcaggtgaaggaggctgaaggatcgtctgaatacaagaaagaaattgaggaactaaaggaactgctacccgaaattagagagaagatagaagatgcaaaggagtctcagcgtagtgggaatgtagctgaactggctctgaaagctactctggtggagagttctacttcaggtttcactcctggtggaggaggctcttcagtctccatgattgccagtagaaagccaacagacggtgcttcctcatcaaattgtgtgactgatatttcccaccttgtcagaaagaagaggaaaccagaggaagagagtccccggaaagatgatgcaaagaaagccaaacaagagccggaggtgaacggaggcagtggggatgctgtcccgagtggaaatgaagtttcggaaaacatggaggaggaggctgagaatcagctgaaacgcggagcagcagtggaggggacactggaggctggagctacagttgaaagcactgcatgttaagagggggcacagcctcctcccaagggaaagtgtttttgtatataatgtattttttcacttttggaggattctttttgtataacttcaataaagattgtaagcaaaaaaaaaa

SEQ ID NO: 175 - protein, 787 aa, Homo sapien [sequence omitted]

SEQ ID NO: 176 - DNA, 2619 bp, Homo sapien
gactcctaggggcttgcagacctagtgggagagaaagaacatcgcagcagccaggcagaaccaggacaggtgaggtgcaggctggctttcctctcgcagcgcggtgtggagtcctgtcctgcctcagggcttttcggagcctggatcctcaaggaacaagtagacctggccgcggggagtggggagggaaggggtgtctattgggcaacagggcggcaaagccctgaataaaggggcgcagggcaggcgcaagtgcagagccttcgtttgccaagtcgcctccagaccgcagacatgaaacttgtcttcctcgtcctgctgttcctcggggccctcggactgtgtctggctggccgtaggagaaggagtgttcagtggtgcgccgtatcccaacccgaggccacaaaatgcttccaatggcaaaggaatatgagaaaagtgcgtggccctcctgtcagctgcataaagagagactcccccatccagtgtatccaggccattgcggaaaacagggccgatgctgtgacccttgatggtggtttcatatacgaggcaggcctggccccctacaaactgcgacctgtagcggcggaagtctacgggaccgaaagacagccacgaactcactattatgccgtggctgtggtgaagaagggcggcagctttcagctgaacgaactgcaaggtctgaagtcctgccacacaggccttcgcaggaccgctggatggaatgtccctacagggacacttcgtccattcttgaattggacgggtccacctgagcccattgaggcagctgtggccaggttcttctcagccagctgtgttcccggtgcagataaaggacagttccccaacctgtgtcgcctgtgtgcggggacaggggaaaacaaatgtgccttctcctcccaggaaccgtacttcagctactctggtgccttcaagtgtctgagagacggggctggagacgtggcttttatcagagagagcacagtgtttgaggacctgtcagacgaggctgaaagggacgagtatgagttactctgcccagacaacactcggaagccagtggacaagttcaaagactgccatctggcccgggtcccttctcatgccgttgtggcacgaagtgtgaatggcaaggaggatgccatctggaatcttctccgccaggcacaggaaaagtttggaaaggacaagtcaccgaaattccagctctttggctcccctagtgggcagaaagatctgctgttcaaggactctgccattgggttttcgagggtgcccccgaggatagattctgggctgtaccttggctccggctacttcactgccatccagaacttgaggaaaagtgaggaggaagtggctgcccggcgtgcgcgggtcgtgtggtgtgcggtgggcgagcaggagctgcgcaagtgtaaccagtggagtggcttgagcgaaggcagcgtgacctgctcctcggcctccaccacagaggactgcatcgccctggtgctgaaaggagaagctgatgccatgagtttggatggaggatatgtgtacactgcatgcaaatgtggtttggtgcctgtcctggcagagaactacaaatcccaacaaagcagtgaccctgatcctaactgtgtggatagacctgtggaaggatatcttgctgtggcggtggttaggagatcagacactagccttacctggaactctgtgaaaggcaagaagtcctgccacaccgccgtggacaggactgcaggctggaatatccccatgggcctgctcttcaaccagacgggctcctgcaaatttgatgaatatttcagtcaaagctgtgcccctgggtctgacccgagatctaatctctgtgctctgtgtattggcgacgagcagggtgagaataagtgcgtgcccaacagcaacgagagatactacggctacactggggctttccggtgcctggctgagaatgctggagacgttgcatttgtgaaagatgtcactgtcttgcagaacactgatggaaataacaatgaggcatgggctaaggatttgaagctggcagactttgcgctgctgtgcctcgatggcaaacggaagcctgtgactgaggctagaagctgccatcttgccatggccccgaatcatgccgtggtgtctcggatggataaggtggaacgcctgaaacaggtgctgctccaccaacaggctaaatttgggagaaatggatctgactgcccggacaagttttgcttattccagtctgaaaccaaaaaccttctgttcaatgacaacactgagtgtctggccagactccatggcaaaacaacatatgaaaaatatttgggaccacagtatgtcgcaggcattactaatctgaaaaagtgctcaacctcccccctcctggaagcctgtgaattcctcaggaagtaaaaccgaagaagatggcccagctccccaagaaagcctcagccattcactgcccccagctcttctccccaggtgtgttggggccttggctcccctgctgaaggtggggattgcccatccatctgcttacaattccctgctgtcgtcttagcaagaagtaaaatgagaaattttgttgatattcaaaaaaaa

SEQ ID NO: 177 - protein, 711 aa, Homo sapien
MKLVFLVLLFLGALGLCLAGRRRRSVQWCAVSQPEATKCFQWQRNMRKVRGPPVSCIKRDSPIQCIQAIAENRADAVTLDGGFIYEAGLAPYKLRPVAAEVYGTERQPRTHYYAVAVVKKGGSFQLNELQGLKSCHTGLRRTAGWNVPTGTLRPFLNWTGPPEPIEAAVARFFSASCVPGADKGQFPNLCRLCAGTGENKCAFSSQEPYFSYSGAFKCLRDGAGDVAFIRESTVFEDLSDEAERDEYELLCPDNTRKPVDKFKDCHLARVPSHAVVARSVNGKEDAIWNLLRQAQEKFGKDKSPKFQLFGSPSGQKDLLFKDSAIGFSRVPPRIDSGLYLGSGYFTAIQNLRKSEEEVAARRARVVWCAVGEQELRKCNQWSGLSEGSVTCSSASTTEDCIALVLKGEADAMSLDGGYVYTACKCGLVPVLAENYKSQQSSDPDPNCVDRPVEGYLAVAVVRRSDTSLTWNSVKGKKSCHTAVDRTAGWNIPMGLLFNQTGSCKFDEYFSQSCAPGSDPRSNLCALCIGDEQGENKCVPNSNERYYGYTGAFRCLAENAGDVAFVKDVTVLQNTDGNNNEAWAKDLKLADFALLCLDGKRKPVTEARSCHLAMAPNHAVVSRMDKVERLKQVLLHQQAKFGRNGSDCPDKFCLFQSETKNLLFNDNTECLARLHGKTTYEKYLGPQYVAGITNLKKCSTSPLLEACEFLRK

SEQ ID NO: 178 - DNA, 5175 bp, Homo sapien
gccccgagtgcaatcgcgggaagccagggtttccagctaggacacagcaggtcgtgatccgggtcgggacactgcctggcagaggctgcgagcatggggccctggggctggaaattgcgctggaccgtcgccttgctcctcgccgcggcggggactgcagtgggcgacagatgtgaaagaaacgagttccagtgccaagacgggaaatgcatctcctacaagtgggtctgcgatggcagcgctgagtgccaggatggctctgatgagtcccaggagacgtgcttgtctgtcacctgcaaatccggggacttcagctgtgggggccgtgtcaaccgctgcattcctcagttctggaggtgcgatggccaagtggactgcgacaacggctcagacgagcaaggctgtccccccaagacgtgctcccaggacgagtttcgctgccacgatgggaagtgcatctctcggcagttcgtctgtgactcagaccgggactgcttggacggctcagacgaggcctcctgcccggtgctcacctgtggtcccgccagcttccagtgcaacagctccacctgcatcccccagctgtgggcctgcgacaacgaccccgactgcgaagatggctcggatgagtggccgcagcgctgtaggggtctttacgtgttccaaggggacagtagcccctgctcggccttcgagttccactgcctaagtggcgagtgcatccactccagctggcgctgtgatggtggccccgactgcaaggacaaatctgacgaggaaaactgcgctgtggccacctgtcgccctgacgaattccagtgctctgatggaaactgcatccatggcagccggcagtgtgaccgggaatatgactgcaaggacatgagcgatgaagttggctgcgttaatgtgacactctgcgagggacccaacaagttcaagtgtcacagcggcgaatgcatcaccctggacaaagtctgcaacatggctagagactgccgggactggtcagatgaacccatcaaagagtgcgggaccaacgaatgcttggacaacaacggcggctgttcccacgtctgcaatgaccttaagatcggctacgagtgcctgtgccccgacggcttccagctggtggcccagcgaagatgcgaagatatcgatgagtgtcaggatcccgacacctgcagccagctctgcgtgaacctggagggtggctacaagtgccagtgtgaggaaggcttccagctggacccccacacgaaggcctgcaaggctgtgggctccatcgcctacctcttcttcaccaaccggcacgaggtcaggaagatgacgctggaccggagcgagtacaccagcctcatccccaacctgaggaacgtggtcgctctggacacggaggtggccagcaatagaatctactggtctgacctgtcccagagaatgatctgcagcacccagcttgacagagcccacggcgtctcttcctatgacaccgtcatcagcagggacatccaggcccccgacgggctggctgtggactggatccacagcaacatctactggaccgactctgtcctgggcactgtctctgttgcggataccaagggcgtgaagaggaaaacgttattcagggagaacggctccaagccaagggccatcgtggtggatcctgttcatggcttcatgtactggactgactggggaactcccgccaagatcaagaaagggggcctgaatggtgtggacatctactcgctggtgactgaaaacattcagtggcccaatggcatcaccctagatctcctcagtggccgcctctactgggttgactccaaacttcactccatctcaagcatcgatgtcaatgggggcaaccggaagaccatcttggaggatgaaaagaggctggcccaccccttctccttggccgtctttgaggacaaagtattttggacagatatcatcaacgaagccattttcagtgccaaccgcctcacaggttccgatgtcaacttgttggctgaaaacctactgtccccagaggatatggtcctcttccacaacctcacccagccaagaggagtgaactggtgtgagaggaccaccctgagcaatggcggctgccagtatctgtgcctccctgccccgcagatcaacccccactcgcccaagtttacctgcgcctgcccggacggcatgctgctggccagggacatgaggagctgcctcacagaggctgaggctgcagtggccacccaggagacatccaccgtcaggctaaaggtcagctccacagccgtaaggacacagcacacaaccacccggcctgttcccgacacctcccggctgcctggggccacccctgggctcaccacggtggagatagtgacaatgtctcaccaagctctgggcgacgttgctggcagaggaaatgagaagaagcccagtagcgtgagggctctgtccattgtcctccccatcgtgctcctcgtcttcctttgcctgggggtcttccttctatggaagaactggcggcttaagaacatcaacagcatcaactttgacaaccccgtctatcagaagaccacagaggatgaggtccacatttgccacaaccaggacggctacagctacccctcgagacagatggtcagtctggaggatgacgtggcgtgaacatctgcctggagtcccgcccctgcccagaacccttcctgagacctcgccggccttgttttattcaaagacagagaagaccaaagcattgcctgccagagctttgttttatatatttattcatctgggaggcagaacaggcttcggacagtgcccatgcaatggcttgggttgggattttggtttcttcctttcctgtgaaggataagagaaacaggcccggggggaccaggatgacacctccatttctctccaggaagttttgagtttctctccaccgtgacacaatcctcaaacatggaagatgaaagggcaggggatgtcaggcccagagaagcaagtggctttcaacacacaacagcagatggcaccaacgggaccccctggccctgcctcatccaccaatctctaagccaaacccctaaactcaggagtcaacgtgtttacctcttctatgcaagccttgctagacagccaggttagcctttgccctgtcacccccgaatcatgacccacccagtgtctttcgaggtgggtttgtaccttccttaagccaggaaagggattcatggcgtcggaaatgatctggctgaatccgtggtggcaccgagaccaaactcattcaccaaatgatgccacttcccagaggcagagcctgagtcaccggtcacccttaatatttattaagtgcctgagacacccggttaccttggccgtgaggacacgtggcctgcacccaggtgtggctgtcaggacaccagcctggtgcccatcctcccgacccctacccacttccattcccgtggtctccttgcactttctcagttcagagttgtacactgtgtacatttggcatttgtgttattattttgcactgttttctgtcgtgtgtgttgggatgggatcccaggccagggaaagcccgtgtcaatgaatgccggggacagagaggggcaggttgaccgggacttcaaagccgtgatcgtgaatatcgagaactgccattgtcgtctttatgtccgcccacctagtgcttccacttctatgcaaatgcctccaagccattcacttccccaatcttgtcgttgatgggtatgtgtttaaaacatgcacggtgaggccgggcgcagtggcctcacgcctgtaatcccagcactttgggaggccgaggcgggtggatcatgaggtcaggagatcgagaccatcctggctaacaaggtgaaaccccgtctctactaaaaatacaaaaaattagccgggcgcggtggtgggcacctgtagtcccagctactcgggaggctgaggcaggagaatggtgtgaacccgggaagcggagcttgcagtgagccgagattgcgccactgcagtccgcagtctggcctgggcgacagagcgagactccgtctcaaaaaaaacaaaacaaaaaaaaaccatgcatggtgcatcagcagcccatggcctctggccaggcatggcgaggctgaggtgggaggatggtttgagctcaggcatttgaggctgtcgtgagctatgattatgccactgctttccagcctgggcaacatagtaagaccccatctcttaaaaaatgaatttggccagacacaggtgcctcacgcctgtaatcccagcactttgggaggctgagctggatcacttgagttcaggagttggagaccaggcctgagcaacaaagcgagatcccatctctacaaaaaccaaaaagttaaaaatcagctgggtatggtggcacgtgcctgtgatcccagctacttgggaggctgaggcaggaggatcgcctgagcccaggaggtggaggttgcagtgagccatgatcgagccactgcactccagcctgggcaacagatgaagaccctatttcagaaatacaactataaaaaaaataaataaatcctccagtctggatcgtttgacgggacttcaggttctttctgaaatcgccgtgttactgttgcactgatgtccggagagacagtgacagcctccgtcagactcccgcgtgaagatgtcacaagggattggcaattgtccccagggacaaaacactgtgtcccccccagtgcagggaaccgtgataagcctttctggtttcggagcacgtaaatgcgtccctgtacagatagtggggattttttgttatgtttgcactttgtatattggttgaaactgttatcacttatatatatatatacacacatatatataaaatctatttatttttgcaaaccctggttgctgtatttgttcagtgactattctcggggccctgtgtagggggttattgcctctgaaatgcctcttctttatgtacaaagattatttgcacgaactggactgtgtgcaacgctttttgggagaatgatgtccccgttgtatgtatgagtggcttctgggagatgggtgtcactttttaaaccactgtatagaaggtttttgtagcctgaatgtcttactgtgatcaattaaatttcttaaatg

SEQ ID NO: 179 - protein, 860 aa, Homo sapien [sequence omitted]

SEQ ID NO: 180 - DNA, 2628 bp, Homo sapien
aagcgatggctgggcccgcgtggatctccaaggtctctcggctgctgggggcattccacaacccaaaacaggtgaccagaggttttactggtggtgttcagacagtaactttaattccaggagatggtattggcccagaaatttcagctgcagttatgaagatttttgatgctgccaaagcacctattcagtgggaggagcggaacgtcactgccattcaaggacctggaggaaagtggatgatcccttcagaggctaaagagtccatggataagaacaagatgggcttgaaaggccctttgaagaccccaatagcagccggtcacccatctatgaatttactgctgcgcaaaacatttgacctttacgcgaatgtccgaccatgtgtctctatcgaaggctataaaaccccttacaccgatgtaaatattgtgaccattcgagagaacacagaaggagaatacagtggaattgagcatgtgattgttgatggagtcgtgcagagtatcaagctcatcaccgagggggcgagcaagcgcattgctgagtttgcctttgagtatgcccggaacaaccaccggagcaacgtcacggcggtgcacaaagccaacatcatgcggatgtcagatgggctttttctacaaaaatgcagggaagttgcagaaagctgtaaagatattaaatttaatgagatgtaccttgatacagtatgtttgaatatggtacaagatccttcccaatttgatgttcttgttatgccaaatttgtatggagacatccttagtgacttgtgtgcaggattgatcggaggtctcggtgtgacaccaagtggcaacattggagccaatggggttgcaatttttgagtcggttcatgggacggctccagacattgcaggcaaggacatggcgaatcccacagccctcctgctcagtgccgtgatgatgctgcgccacatgggactttttgaccatgctgcaagaattgaggctgcgtgttttgctacaattaaggacggaaagagcttgacaaaagatttgggaggcaatgcaaaatgctcagacttcacagaggaaatctgtcgccgagtaaaagatttagattaacacttctacaactggcatttacatcagtcactctaaatggacaccacatgaacctctgtttagaatacctacgtatgtatgcattggtttgcttgtttcttgacagtacatttttagatctggccttttcttaacaaaatctgtgcaaaagatgcaggtggatgtccctaggtctgttttcaaagaactttttccaagtgcttgttttatttattaagtgtctacctggtaaatgttttttttgtaaactctgagtggactgtatcatttgctattctaaaccattttacacttaagttaaaatagtttctcttcagctgtaaataacaggatacagaattaacaagagaaaatgtctaactttttaagaaaaaccttattttcttcggtttttgaaaaacataatggaaataaaacaggatattgacataatagcacaaaatgacactcttctaaaactaaatgggcacaagagaattttcctgggaaagttcacatcaaaaagagtgaatgtggtatatttctaaatgatatggaaaatagagacagatttgtcctttacagaaattactgagtgtgaataaaaacttcagatccaagaaatatataatgagagatataatttttgttaataagacaaaggtaatatattggatacaaagacacaaatgtattgtgtgttcaattattttgttgtcttgagatttaatattctttccaagagcttttaatgaagcagagagctagtacttcattttcactggatacattttcagcatcatgagttgtcacagcctctgagcccctgatctgaagccagaagggctgagtgtattgtaaacttattcttgcatgttgctgtctgggaatggaccacactacagcaggtagttctgggggcgatactgccgaaaggcccgaacacatgtattttggctgcaattgaggaacttgggatgctattaattttgtatttcagcaactgccccttctcctatcccaaagcaccaattactgccctctgcctcagcagtaccagtataagatgacattccaaagactggaggcaactcagcctgagttaattcacaaaattatgccatgctggggcttgagcttgagcttgggcttaggcttgggctcagcttttgaccctcaggcatctccttttccttcctgtcttcctctcccttctcctctgctgcagcatgattttcttaatcttcagacactcactattttcatgaacagttaccctctgtccccacaaccaaagacaactcatggcctcctttggcccttgtgtaacattgcaaacctgtggctttgcaaaatgtacccaggtcacaaggggatttttttttttttagcaatgatatccctgtctgggtcactttttaagcttgtaaccgcccccccagacttataatcttaaatgtattttcctttgtttaagctgctgcttcctctgtttcattggattgtgccagttatcagtggctcttgggttcaaagtaataaa

SEQ ID NO: 181 - protein, 366 aa, Homo sapien
MAGPAWISKVSRLLGAFHNPKQVTRGFTGGVQTVTLIPGDGIGPEISAAVMKIFDAAKAPIQWEERNVTAIQGPGGKWMIPSEAKESMDKNKMGLKGPLKTPIAAGHPSMNLLLRKTFDLYANVRPCVSIEGYKTPYTDVNIVTIRENTEGEYSGIEHVIVDGVVQSIKLITEGASKRIAEFAFEYARNNHRSNVTAVHKANIMRMSDGLFLQKCREVAESCKDIKFNEMYLDTVCLNMVQDPSQFDVLVMPNLYGDILSDLCAGLIGGLGVTPSGNIGANGVAIFESVHGTAPDIAGKDMANPTALLLSAVMMLRHMGLFDHAARIEAACFATIKDGKSLTKDLGGNAKCSDFTEEICRRVKDLD

SEQ ID NO: 182 - DNA, 5434 bp, Homo sapien
caagtgccgtcgccgcgccccttccccctcccgcctccccggccccctccccggaaccggcggtcgagctacggtcgcggacgagtggaaccgagactgccccgcggagccgccggtatgagcgcccctcgccaccccgtgtcccaggcccggcctttctgacaagagctagacttcgggctccttgaggatattcagttttgtatgtttgaatatcctctcaccatgttcagcataaagtaccattcttaatgattatcctcaacaagacaggtgtgagagggttgctgttgcattgcaatcatggtgcaaaaataccagtccccagtgagagtgtacaaatacccctttgaattaattatggctgcctatgaaaggaggttccctacatgtcctttgattccgatgttcgtgggcagtgacactgtgagtgaattcaagagcgaagatggggctattcatgtcattgaaaggcgctgcaagctggatgtagatgcacccagactgctgaagaagattgcaggagttgattatgtttattttgtccagaaaaactcactgaattctcgggaacgtactttgcacattgaggcttataatgaaacgttttccaatcgggtcatcattaatgagcattgctgctacaccgttcaccctgaaaatgaagattggacctgttttgaacagtctgcaagtttagatattaaatctttctttggttttgaaagtacagtggaaaaaattgcaatgaaacaatataccagcaacattaaaaaaggaaaggaaatcatcgaatactaccttcgccaattagaagaagaaggcataacctttgtgccccgttggagtccgccttccatcacgccctcttcagagacatcttcatcatcctccaagaaacaagcagcgtccatggccgtcgtcatcccagaagctgccctcaaggaggggctgagtggtgatgccctcagcagccccagtgcacctgagcccgtggtgggcacccctgacgacaaactagatgccgaccacatcaagagatacctgggcgatttgactccgctgcaggagagctgcctcattagacttcgccagtggctccaggagacccacaagggcaaaattccaaaagatgagcatattcttcggttcctccgtgcacgggattttaatattgacaaagccagagagatcatgtgtcagtctttgacgtggagaaagcagcatcaggtagactacattcttgaaacctggacccctcctcaggtccttcaggattactacgcgggaggctggcatcatcacgacaaagatgggcggcccctctacgtgctcaggctggggcagatggacaccaaaggcttggtgagagcgctcggggaggaagccctgctgagatacgttctctccgtaaatgaagaacggctaaggcgatgcgaagagaatacaaaagtctttggtcggcctatcagctcatggacctgcctggtggacttggaagggctgaacatgcgccacttgtggagacctggtgtgaaagcgctgctgcggatcatcgaggtggtggaggccaactaccctgagacactgggccgccttctcatcctgcgggcgcccagggtatttcctgtgctctggacgctggttagtccgttcattgatgacaacaccagaaggaagttcctcatttatgcaggaaatgactaccagggtcctggaggcctgctggattacatcgacaaagagattattccagatttcctgagtggggagtgcatgtgcgaagtgccagagggtggactggtccccaaatctctgtaccggactgcagaggagctggagaacgaagacctgaagctctggactgagaccatctaccagtctgcaagcgtcttcaaaggagccccacatgagattctcattcagattgtggatgcctcgtcagtcatcacttgggatttcgacgtgtgcaaaggggacattgtgtttaacatctatcactccaagaggtcgccacaaccacccaaaaaggactccctgggagcccacagcatcacctctccgggtgggaacaatgtgcagctcatagacaaagtctggcagctgggccgcgactacagcatggtggagtcgcctctgatctgcaaagaaggagaaagcgtgcagggttcccatgtgaccaggtggccgggcttctacatcctgcagtggaaattccacagcatgcctgcgtgcgccgccagcagccttccccgggtggacgacgtgcttgcgtccctgcaggtctcttcgcacaagtgtaaagtgatgtactacaccgaggtgatcggctcggaggatttcagaggttccatgacgagcctggagtccagccacagcggcttctcccagctgagtgccgccaccacctcctccagccagtcccactccagctccatgatctccaggtagtgccgcgctgcctgcacctagtgtgcagaggggacggccgcccctcctcggacagcagctgcacccgcccacccagcggcgacattgtacagactcctctcacctctagatagcaaatagctctcagatggtaaacgtagtcgtttgatcccaaaactaccttggcaggtagttttaactctgatcctaacttaactcaatagccatagattttgtatacgttgtgcacaaaatccaaccagagcgcaagggctctcttgaaagaaaagtagtttctgtaccaattaaaggattgacgtggtctcagatattgatgcaaaaaatttttccaacgaactccgcattgtccattagtgaatgaattcctgtgacatcctccagagatggcccctcctcacctgggacggaagctgccagctcgcttcccccaagctgcctcatggcccgcacgccgcctcacggcccccatgcttcccgccagtcaagatggtctgtggacttagggccagcccttgaggtccttatcctctgaggattcagaggttgcctgcggagtaccttgtcccagggccagacacacccacaccacccactgtctgcagtggggccgggggctcaggaggggctctcagggactcctggtgactccaggaaaatgctgccatcgttaaacattactttctctttcctccttttcaaatctttttgatactttttagagcaggatttttctgtatgtgaacttgggtgggggggttcttcccgtttccttccgtgcgtcgcccctctcacctgcagtcagctcccagcccagtgtaggccatctcctctgtgccctctggaggctcattgtctcagagcccagacagttccagccactaggaggccgtcttggaaccagcaagtcgcatttgccacttgacactgtccatggggttttattagtagctaagcagcagctctcgcatccacttcagggtggcgtgtggcatgtaggagtcctgcttctttgtacatgggaattgtggactcatgcgtgtgtgtgtgtgcatgtgctgtgtgtgtgcatgtgtgcatgacggtgggggtgctggggggacggggtgagtggaaacttagtttgagtaatgaaggaatcttcacagaagcaaatcagaatatgggatttgtttgccttttacattttgtttaattcctgattttaaagcctgctctatctggtacaggcccttattttttcagctttttatgggaaaagcaggttatttgagaatctgtccagaagttgcataggggatggcctccacgataaggacatgcaacacgtgtttctgtgtgcagcagaggccgtgtttttcatgccaaaccccacgcggctgtcaactgtgtgcgtggtaggcatggagatcctggttgtgccgtctcagctccgctctgaaggcactgtgtgggtgctgcgtgactggagagctgtgtggaggccatgtgtgccccgtgcagggatcaggagggcgggggagggaccgagcagccctcttgcccggtcgggtcagccctagtggctgcctgcacactgtagacgtcccagggcctgtgctgtgatcacctgcctttggaccacatttgtgtttgctcttagagatcgagctcctcagtggtacctgaagcctttgcttccggaaagcgcggtagggttcgtaggtagggctagtaggtagggttagtaggtagggctagtaggtagggctagtaggtagggttagtaggtagggttcgtaggtagggctggtaggtagggttagtaggtagggctagtaggtagggttcgtaggtagggctagtaggtagggttagtaggtagggctagtaggtagggctagtaggtagggttagtaggtagggttcgtaggtagggctggtaggtagggttagtaggtagggctagtaggtagggttcgtaggtagggctagtaggtagggttagtaggtagggctagtaggtagggctagtaggtagggttagtaggtagggttcgtaggtagggctggtaggtagggttagtaggtagggctagtaggtagggctagtaggtagggctagtaggtagggttagtaggtagggctagtaggtagggctagtaggtagggttagtaggtagggttcgtaggtagggctggtaggtagggttagtaggtagggctagtaggtagggctagtaggtagggctagtaggtagggctagtaggtagggctagtaggtagggctagtaggtagggctagtaggtagggttcgtaggtagggttcgtaggtagggttcgtaggtagggttagtagcgcgtctgtgctgcttccacctggtgcttcctgttcccaaatcacaagggcctgaaggtggtccctgctttctctttctctttctctgtgtctcagatggcgattttgctgacagctgccaagaaaatgcttcactcaacagtcctcatgtgcccagagatgtttatagaactgtttgaattgcagccatcccctgccccctcccaggctgaagatctgttctttttaagttgattcgggagtggcattcttttatacccaaagactgtagtgcatcttgaagagctcaaagcacatgaccgcacaaatgcttacagggtttcctcccgagtaatccaatctcactccccttgtaagggaattctggggcagctatggtttgagtatgcagtttgcatcgtgtttctacctttagtaccttgccactcttttaaaacgctgctgtcatttcccatttcttagtactaatgattctttgattctccctctattatgtcttaattcactttccttcctaaatttgttatttgcatatcaaattctgtaaatgttttgtaaacatattacctcacttggtaatacaatactgatagtctttaaaagatttttttattgttatcaataataaatgtgaactatttaaag

SEQ ID NO: 183 - protein, 715 aa, Homo sapien
MVQKYQSPVRVYKYPFELIMAAYERRFPTCPLIPMFVGSDTVSEFKSEDGAIHVIERRCKLDVDAPRLLKKIAGVDYVYFVQKNSLNSRERTLHIEAYNETFSNRVIINEHCCYTVHPENEDWTCFEQSASLDIKSFFGFESTVEKIAMKQYTSNIKKGKEIIEYYLRQLEEEGITFVPRWSPPSITPSSETSSSSSKKQAASMAVVIPEAALKEGLSGDALSSPSAPEPVVGTPDDKLDADHIKRYLGDLTPLQESCLIRLRQWLQETHKGKIPKDEHILRFLRARDFNIDKAREIMCQSLTWRKQHQVDYILETWTPPQVLQDYYAGGWHHHDKDGRPLYVLRLGQMDTKGLVRALGEEALLRYVLSVNEERLRRCEENTKVFGRPISSWTCLVDLEGLNMRHLWRPGVKALLRIIEVVEANYPETLGRLLILRAPRVFPVLWTLVSPFIDDNTRRKFLIYAGNDYQGPGGLLDYIDKEIIPDFLSGECMCEVPEGGLVPKSLYRTAEELENEDLKLWTETIYQSASVFKGAPHEILIQIVDASSVITWDFDVCKGDIVFNIYHSKRSPQPPKKDSLGAHSITSPGGNNVQLIDKVWQLGRDYSMVESPLICKEGESVQGSHVTRWPGFYILQWKFHSMPACAASSLPRVDDVLASLQVSSHKCKVMYYTEVIGSEDFRGSMTSLESSHSGFSQLSAATTSSSQSHSSSMISR

SEQ ID NO: 184 - DNA, 3379 bp, Homo sapien
aattccgcggaatcatcggaatccttcaccatggcatccagcccggcccagcgtcggcgaggcaatgatcctctcacctccagccctggccgaagctcccggcgtactgatgccctcacctccagccctggccgtgaccttccaccatttgaggatgagtccgaggggctcctaggcacagaggggcccctggaggaagaagaggatggagaggagctcattggagatggcatggaaagggactaccgcgccatcccagagctggacgcctatgaggccgagggactggctctggatgatgaggacgtagaggagctgacggccagtcgaagggaggcagcagacgggccatgcggcacggtgaccgggagctggccggggctgggcgcatgcgccgtgggctcctgtatgacagcgatgaggaggacgaggagcgccctgcccgcaagcgccgccagtggagccggcacggaggacggcgaggaggacgagcagatgattgagagcatcgagaacctggaggatctcaaaggccactctgtgcgcgagtgggtgagcatggcgggcccccggctggagatccaccaccgcttcaagaacttcctgcgcactcacgtcgacagccacggccacaacgtcttcaaggagcgcatcagcgacatgtgcaaagagaaccgtgagagcctggtggtgaactatgaggacttggcagccagggagcacgtgctggcctacttcctgcctgaggcaccggcggagctgctgcagatctttgatgaggctgccctggaggtggtactggccatgtaccccaagtacgaccgcatcaccaaccacatccatgtccgcatctcccacctgcctctggtggaggagctgcgctcgctgaggcagctgcatctgaaccagctgatccgcaccagtggggtggtgaccagctgcactggcgtcctgccccagctcagcatggtcaagtacaactgcaacaagtgcaatttcgtcctgggtcctttctgccagtcccagaaccaggaggtgaaaccaggctcctgtcctgagtgccagtcggccggcccctttgaggtcaacatggaggagaccatctatcagaactaccagcgtatccgaatccaggagagtccaggcaaagtggcggctcggcggctgccccgctccaaggacgccattctcctcgcagatctggtggacagctgcaacgcaggagacgagatagagctgactggcatctatcacaacaactatgatggctccctcaacactgccaatggcttccctgtctttgccactgtcatcctagccaaccacgtggccaagaaggacaacaaggttgctgtaggggaactgaccgatgaagatgtgaagatgatcactagcctctccaaggatcagcagatcggagagaagatctttgccagcattgctccttccatctatggtcatgaagacatcaagagaggccctgctctggccctgttcggaggggagcccaaaaacccaggtggcaagcacaaggtacgtggtgatatcaacgtgctcttgtgcggagaccctggcacagcgaagtcgcagtttctcaagtatattgagaaagtgtccagccgagccatcttcaccactggccagggggcgtcggctgtggccgtcacggcgtatgtccagcggcaccctgtcagcagggagtggaccttggaggctggggccctggttctggctgaccgaggagtgtgtctcattgatgaatttgacaagatgaatgaccaggacagaaccagcatccatgaggccatggagcaacagagcatctccatctcgaaggctggcatcgtcacctccctgcaggctcgctgcacggtcattgctgccgccaaccccataggagggcgctacgacccctcgctgactttctctgagaacgtggacctcacagagcccatcatctcacgctttgacatcctgtgtgtggtgagggacaccgtggacccagtccaggacgagatgctggcccgcttcgtggtgggcagccacgtcagacaccaccccagcaacaaggaggaggaggggctggccaatggcagcgctgctgagcccgccatgcccaacacgtatggcgtggagcccctgccccaggaggtcctgaagaagtacatcatctacgccaaggagagggtccacccgaagctcaaccagatggaccaggacaaggtggccaagatgtacagtgacctgaggaaagaatctatggcgacaggcagcatccccattacggtgcggcacatcgagtccatgagtcatggcggaggcccacgcgcgcatccatctgcgggactatgtgatcgaagacgacgtcaacatggccatccgcgtgatgctggagagcttcatagacacacagaagttcagcgtcatcgcagcatgcgcaagacttttgcccgctacctttcattccggcgtgacaacaatgagctgttgctcttcatactgaagcagttagtggcagagcaggtgacatatcagcgcaaccgctttggggcccagcaggacactattgaggtccctgagaaggacttggtggataaggctcgtcagatcaacatccacaacctctctgcattttatgacagtgagctcttcaggatgaacaagttcagccacgacctgaaaaggaaaatgatcctgcagcagttctgaggccctatgccatccataaggattccttgggattctggtttggggtggtcagtgccctctgtgctttatggacacaaaaccagagcacttgatgaactcggggtactagggtcagggcttatagcaggatgtctggctgcacctggcatgactgtttgtttctccaagcctgctttgtgcttctcacctttgggtgggatgccttgccagtgtgtcttacttggttgctgaacatcttgccacctccgagtgctttgtctccactcagtaccttggatcagagctgctgagttcaggatgcctgcgtgtggtttaggtgttagccttcttacatggatgtcaggagagctgctgccctcttggcgtgagttgcgtattcaggctgcttttgctcgctttggccagagagctggttgaagatgtttgtaatcgttttcagtctcctgcaggtttctgtgcccctgtggtggaagaggcacgacagtgccagcgcagcgttctgggctcctcagtcgcaggggtgggatgtgagtcatgcggattatccactcgccacagttatcagctgccattgctccctgtctgtttccccactctcttatttgtgcattcggtttggtttctgtagttttaatttttaataaagttgaataaaatataaaaaaaaaaa

SEQ ID NO: 185 - protein, 892 aa, Homo sapien
MASSPAQRRRGNDPLTSSPGRSSRRTDALTSSPGRDLPPFEDESEGLLGTEGPLEEEEDGEELIGDGMERDYRAIPELDAYEAEGLALDDEDVEELTASRREAADGPCGTVTGSWPGLGACAVGSCMTAMRRTRSALPASAASGAGTEDGEEDEQMIESIENLEDLKGHSVREWVSMAGPRLEIHHRFKNFLRTHVDSHGHNVFKERISDMCKENRESLVVNYEDLAAREHVLAYFLPEAPAELLQIFDEAALEVVLAMYPKYDRITNHIHVRISHLPLVEELRSLRQLHLNQLIRTSGVVTSCTGVLPQLSMVKYNCNKCNFVLGPFCQSQNQEVKPGSCPECQSAGPFEVNMEETIYQNYQRIRIQESPGKVAARRLPRSKDAILLADLVDSCNAGDEIELTGIYHNNYDGSLNTANGFPVFATVILANHVAKKDNKVAVGELTDEDVKMITSLSKDQQIGEKIFASIAPSIYGHEDIKRGPALALFGGEPKNPGGKHKVRGDINVLLCGDPGTAKSQFLKYIEKVSSRAIFTTGQGASAVAVTAYVQRHPVSREWTLEAGALVLADRGVCLIDEFDKMNDQDRTSIHEAMEQQSISISKAGIVTSLQARCTVIAAANPIGGRYDPSLTFSENVDLTEPIISRFDILCVVRDTVDPVQDEMLARFVVGSHVRHHPSNKEEEGLANGSAAEPAMPNTYGVEPLPQEVLKKYIIYAKERVHPKLNQMDQDKVAKMYSDLRKESMATGSIPITVRHIESMSHGGGPRAHPSAGLCDRRRRQHGHPRDAGELHRHTEVQRHRSMRKTFARYLSFRRDNNELLLFILKQLVAEQVTYQRNRFGAQQDTIEVPEKDLVDKARQINIHNLSAFYDSELFRMNKFSHDLKRKMILQQF

SEQ ID NO: 186 - DNA, 3817 bp, Homo sapien
tgaattcgtgagagacttgagggaggcgctgcgactgacaagcggctctgcccgggaccttctcgctttcatctagcgctgcactcaatggaggggcgggcaccgcagtgcttaatgctgtcttaactagtgtaggaaaacggctcaacccaccgctgccgaaatgaagtataagaatcttatggcaagggccttatatgacaatgtcccagagtgtgccgaggaactggcctttcgcaagggagacatcctgaccgtcatagagcagaacacagggggactggaaggatggtggctgtgctcgttacacggtcggcaaggcattgtcccaggcaaccgggtgaagcttctgattggtcccatgcaggagactgcctccagtcacgagcagcctgcctctggactgatgcagcagacctttggccaacagaagctctatcaagtgccaaacccacaggctgctccccgagacaccatctaccaagtgccaccttcctaccaaaatcagggaatttaccaagtccccactggccacggcacccaagaacaagaggtatatcaggtgccaccatcagtgcagagaagcattgggggaaccagtgggccccacgtgggtaaaaaggtgataacccccgtgaggacaggccatggctacgtatacgagtacccatccagataccaaaaggatgtctatgatatccctccttctcataccactcaaggggtatacgacatccctccctcatcagcaaaaggccctgtgttttcagttccagtgggagagataaaacctcaaggggtgtatgacatcccgcctacaaaaggggtatatgccattccgccctctgcttgccgggatgaagcagggcttagggaaaaagactatgacttcccccctcccatgagacaagctggaaggccggacctcagaccggagggggtttatgacattcctccaacctgcaccaagccagcagggaaggaccttcatgtaaaatacaactgtgacattccaggagctgcagaaccggtggctcgaaggcaccagagcctgtccccgaatcacccacccccgcaactcggacagtcagtgggctctcagaacgacgcatatgatgtcccccgaggcgttcagtttcttgagccaccagcagaaaccagtgagaaagcaaacccccaggaaagggatggtgtttatgatgtccctctgcataacccgccagatgctaaaggctctcgggacttggtggatgggatcaaccgattgtctttctccagtacaggcagcacccggagtaacatgtccacgtcttccacctcctccaaggagtcctcactgtcagcctccccagctcaggacaaaaggctcttcctggatccagacacagctattgagagacttcagcggctccagcaggcccttgagatgggtgtctccagcctaatggcactggtcactaccgactggcggtgttacggatatatggaaagacacatcaatgaaatacgcacagcagtggacaaggtggagctgttcctgaaggagtacctccactttgtcaagggagctgttgcaaatgctgcctgcctcccggaactcatcctccacaacaagatgaagcgggagctgcaacgagtcgaagactcccaccagatcctgagtcaaaccagccatgacttaaatgagtgcagctggtccctgaatatcttggccatcaacaagccccagaacaagtgtgacgatctggaccggtttgtgatggtggcaaagacggtgcccgatgacgccaagcagctcaccacaaccatcaacaccaacgcagaggccctcttcagacccggccctggcagcttgcatctgaagaatgggccggagagcatcatgaactcaacggagtacccacacggtggctcccagggacagctgctgcatcctggtgaccacaaggcccaggcccacaacaaggcactgcccccaggcctgagcaaggagcaggcccctgactgtagcagcagtgatggttctgagaggagctggatggatgactacgattacgtccacctacagggtaaggaggagtttgagaggcaacagaaagagctattggaaaaagagaatatcatgaaacagaacaagatgcagctggaacatcatcagctgagccagttccagctgttggaacaagagattacaaagcccgtggagaatgacatctcgaagtggaagccctctcagagcctacccaccacaaacagtggcgtgagtgctcaggatcggcagttgctgtgcttctactatgaccaatgtgagacccatttcatttcccttctcaacgccattgacgcactcttcagttgtgtcagctcagcccagcccccgcgaatcttcgtggcacacagcaagtttgtcatcctcagtgcacacaaactggtgttcattggagacacgctgacacggcaggtgactgcccaggacattcgcaacaaagtcatgaactccagcaaccagctctgcgagcagctcaagactatagtcatggcaaccaagatggccgccctccattaccccagcaccacggccctgcaggaaatggtgcaccaagtgacagacctttctagaaatgcccagctgttcaagcgctctttgctggagatggcaacgttctgagaagaaaaaaaagaggaaggggactgcgttaacggttactaaggaaaactggaaatactgtctggtttttgtaaatgttatctatttttgtagataattttatataaaaatgaaatattttaacattttatgggtcagacaactttcagaaattcagggagctggagagggaaatctttttttcccccctgagtgttcttatgtatacacagaagtatctgagacataaactgtacagaaaacttgtccacgtccttttgtatgcccatgtattcatgtttttgtttgtagatgtttgtctgatgcatttcattaaaaaaaaaaccatgaattacgaagcaccttagtaagcaccttctaatgctgcattttttttgttgttgttaaaaacatccagctggttataatattgttctccacgtccttgtgatgattctgagcctggcactgggaatctgggaagcatagtttatttgcaagtgttcaccttccaaatcatgaggcatagcatgacttattcttgttttgaaaactcttttcaaaactgaccatcttaaacacatgatggccaagtgccacaaagccctcttgcggagacatttacgaatatatatgtggatccaagtctcgatagttaggcgttggagggaagagagaccagagagtttagaggccaggaccacagttaggattgggttgtttcaatactgagagacagctacaataaaaggagagcaattgcctccctggggctgttcaatcttctgcatttgtgagtggttcagtcatgaggttttccaaaagatgtttttagagttgtaaaaaccatatttgcagcaaagatttacaaaggcgtatcagactatgattgttcaccaaaataggggaatggtttgatccgccagttgcaagtagaggcctttctgactcttaatattcactttggtgctactacccccattacctgaggaactggccaggtccttgatcatggaactatagagctaccagacatatcctgctctctaagggaatttattgctatcttgcaccttctttaaaactcaaaaaacatatgcagacctgacactcaagagtggctagctacacagagtccatctaatttttgcaacttccccccccgaattc

SEQ ID NO: 187 - protein, 834 aa, Homo sapien
MKYKNLMARALYDNVPECAEELAFRKGDILTVIEQNTGGLEGWWLCSLHGRQGIVPGNRVKLLIGPMQETASSHEQPASGLMQQTFGQQKLYQVPNPQAAPRDTIYQVPPSYQNQGIYQVPTGHGTQEQEVYQVPPSVQRSIGGTSGPHVGKKVITPVRTGHGYVYEYPSRYQKDVYDIPPSHTTQGVYDIPPSSAKGPVFSVPVGEIKPQGVYDIPPTKGVYAIPPSACRDEAGLREKDYDFPPPMRQAGRPDLRPEGVYDIPPTCTKPAGKDLHVKYNCDIPGAAEPVARRHQSLSPNHPPPQLGQSVGSQNDAYDVPRGVQFLEPPAETSEKANPQERDGVYDVPLHNPPDAKGSRDLVDGINRLSFSSTGSTRSNMSTSSTSSKESSLSASPAQDKRLFLDPDTAIERLQRLQQALEMGVSSLMALVTTDWRCYGYMERHINEIRTAVDKVELFLKEYLHFVKGAVANAACLPELILHNKMKRELQRVEDSHQILSQTSHDLNECSWSLNILAINKPQNKCDDLDRFVMVAKTVPDDAKQLTTTINTNAEALFRPGPGSLHLKNGPESIMNSTEYPHGGSQGQLLHPGDHKAQAHNKALPPGLSKEQAPDCSSSDGSERSWMDDYDYVHLQGKEEFERQQKELLEKENIMKQNKMQLEHHQLSQFQLLEQEITKPVENDISKWKPSQSLPTTNSGVSAQDRQLLCFYYDQCETHFISLLNAIDALFSCVSSAQPPRIFVAHSKFVILSAHKLVFIGDTLTRQVTAQDIRNKVMNSSNQLCEQLKTIVMATKMAALHYPSTTALQEMVHQVTDLSRNAQLFKRSLLEMATF

SEQ ID NO: 188 - DNA, 2318 bp, Homo sapien
cgcagggaccgtgctccgccgtctccgccgcatcttccaccctcgccgccgccgcagctccccgcgctcgtgccaccgccgccgcgtccaccctcagcgccaccgccatgcgggagatcgtgcacctgcaggccggccagtgcggcaaccagatcggggccaagttttgggaggttatcagtgacgaacatggcatcgaccccacaggcacataccatggggacagtgacctgcaactggagaggatcaacgtgtactacaacgaggccacaggaggaaattatgtccccagagcggtgctggtggacctggaacccggcaccatggactctgtccgttctggccccttcggtcagatctttcggccggacaacttcgtgtttggccaatccggagccggcaacaactgggcaaaggggcactacacggagggcgcagagctggtggacgctgtcctggacgtagtccggaaggaggccgagagctgcgactgccttcagggcttccagctgacccactcgctggggggtggcacggggtccggaatgggcacgctgctcatcagtaagatccgcgaggagttcccagaccgcatcatgaacaccttcagcgtggtgccctcgcccaaagtgtcagacacggtggtggagccctacaacgccacgctgtctgtgcaccagctggtggagaatacggatgagacctactgcatcgacaacgaggcactctacgacatctgtttccgcaccctcaagctgaccacccccacctacggggacctcaaccacctggtgtcggccaccatgagcggggtcaccacctgcctgcgcttcccgggccagctgaacgccgacctgcgcaagctggccgtcaacatggttccctttcctcgcctgcacttcttcatgcccggcttcgcacccctgaccagccggggcagccagcagtaccgggccctgacggtgcccgagctcacccagcagatgttcgatgccaagaacatgatggcggcgtgcgacccgcgccacggccgctacctgaccgtggccgccgtgttccggggccgcatgtccatgaaggaggtggacgagcagatgctgagcgtgcagagcaagaacagcagctacttcgtggagtggatccccaacaacgtgaagacggccgtgtgcgacatcccgccccgcggcctgaagatggccgcgaccttcatcggcaacagcacggccatccaggagctgttcaagcgcatctccgagcagttcacggccatgttccggcgcaaggccttcttgcactggtacacgggcgagggcatggacgagatggagttcaccgaggccgagagcaacatgaatgacctggtatctgagtaccagcagtaccaggacgccacggccgaggagggcgagttcgaggaggaggcggaggaggaggtggcctaggctgctcccatcgcttcccacctgtcccctcgaggcttctgacctttgatccgctaggccccccatctctgaaccctagagccccgctttccctccaaggctgactccccgctgaccctaacaatacctttggagctcgctttacctctggctacttcatctccgaccctggctcccctttgagccctaatttatctttaacccccttgagctcttccaaccttgacattcccaggaggagccccgcttcaccccttctgactctggaaaccgcacctttaactttgcagaccttccttcacccctgacttctgcttcacctttgacctctgccccccatgaatcccattttacctctagacctataagttctggtttatgtttgacccctccctctgagctgcacttcaccgctgaccttgcctcacctttaaccccccacctgagccccagctcctacctctgaccccaacttctctttgatctctgaatcccctctgactccaacttctctttcaccctctatgagtcccattttacttctacacctgcaagtcctggtttatattggacccctccctccgagctgcagttcacctttgaccttgcctcacctttcaccccccaccccccacagcgtcagctcctacctctgaccccagcttctctctgattcccacaggccccatgcatcctccctgcctcactcccctcagcccctgccgaccttagcttatctgggagagaaacaaggcctggtgcctgtgaggaagagaggtcacccctaccctccctccccgcttccctgcctcaccctcaataaataaattaattgttgtcatggaaaaaaaaaaaaaaaaaaaaaaaaaaaaaaaa

SEQ ID NO: 189 - protein, 444 aa, Homo sapien
MREIVHLQAGQCGNQIGAKFWEVISDEHGIDPTGTYHGDSDLQLERINVYYNEATGGNYVPRAVLVDLEPGTMDSVRSGPFGQIFRPDNFVFGQSGAGNNWAKGHYTEGAELVDAVLDVVRKEAESCDCLQGFQLTHSLGGGTGSGMGTLLISKIREEFPDRIMNTFSVVPSPKVSDTVVEPYNATLSVHQLVENTDETYCIDNEALYDICFRTLKLTTPTYGDLNHLVSATMSGVTTCLRFPGQLNADLRKLAVNMVPFPRLHFFMPGFAPLTSRGSQQYRALTVPELTQQMFDAKNMMAACDPRHGRYLTVAAVFRGRMSMKEVDEQMLSVQSKNSSYFVEWIPNNVKTAVCDIPPRGLKMAATFIGNSTAIQELFKRISEQFTAMFRRKAFLHWYTGEGMDEMEFTEAESNMNDLVSEYQQYQDATAEEGEFEEEAEEEVA

SEQ ID NO: 190 - DNA, 1347 bp, Homo sapien
ggcacgagggagaactagtctcgatttttttttttttttttttctttgttttgtttttcctgtataaaaaaggaccccaaatataaaggtagggaaagggacaagagggaacataccccttagtgtagagaaatgggaaggagaaggagaagcctcaaaaggagaggtgggaggggaatgtcattaaggcagcaaagtaatctctgtagaaagatggaggaggaccctccatagcctcagagataaaggcaaagattgccctctcagtgtccagaagggaaatggcagcttttcttccttccatggcagccactccattgctcactccggattaccttcatccttatgtagataagagtgctgcagagctcgaaaggcagagattcgcttgtgtgggttaaaagtcagcatttccagcagcagctgtgctcccgactcctccatctcaggtaccaccgactgcactgggcggggccctctggggggaaaggctccacggggcagggatacatctcgaggccagtcatcctctggaggcagcccaatcaggtcaaagattttgcccaactggtcggcttcagagtttccacagaagagaggctttcgacgaaacatctctgcaaagatacagccaacactccacatgtccacaggtgttgcatatgtggactgcagaagaacttcgggagctcggtaccagagtgtaacaaccacgggtgtaagtgccatctggtagctgtagattctggccaggccaaagtcagccagcttgactgttccaccacttgtcaccagaatgttctctggcttcagatctcggtgaacgatgcaattggcatgaaggaaatctaggcctcttagaaactggcgcatcagatccttgatcgtttcggctggcaagcctggtgggggtgccttgtccagatatgtccttaggtcctggtctacatgctcaaacaccagggttaccttgatctcccggtcagttcgggatgtggcacagacgtccatcagccggacaacattgggatgctcaaaagcctccagtcgcctcagtaaagccacctcacgaactgtgctgatgggaaggcctcctccacctcctcctccattggggactctcacactcttgagggccacaaagtggccactgtggggatcacgggccttgtacactgtcccataggcaccgacaccaatttcagccactggctcatatcgagaggtagccattctcagatcaagggagaccctcacgccagcccggggtgctgtgggggcggcccgttatcggggccccggagccggttcctacggccccatacacccgagctcggtccggagcag

SEQ ID NO: 191 - protein, 30 aa, Homo sapien
MSTGVAYVDCRRTSGARYQSVTTTGVSAIW

SEQ ID NO: 192 - DNA, 2281 bp, Homo sapien
agctgaggtgtgagcagctgccgaagtcagttccttgtggagccggagctgggcgcggattcgccgaggcaccgaggcactcagaggaggtgagagagcggcggcagacaacaggggaccccgggccggcggcccagagccgagccaagcgtgcccgcgtgtgtccctgcgtgtccgcgaggatgcgtgttcgcgggtgtgtgctgcgttcacaggtgtttctgcggcaggcgccatgtcagaaccggctggggatgtccgtcagaacccatgcggcagcaaggcctgccgccgcctcttcggcccagtggacagcgagcagctgagccgcgactgtgatgcgctaatggcgggctgcatccaggaggcccgtgagcgatggaacttcgactttgtcaccgagacaccactggagggtgacttcgcctgggagcgtgtgcggggccttggcctgcccaagctctaccttcccacggggccccggcgaggccgggatgagttgggaggaggcaggcggcctggcacctcacctgctctgctgcaggggacagcagaggaagaccatgtggacctgtcactgtcttgtacccttgtgcctcgctcaggggagcaggctgaagggtccccaggtggacctggagactctcagggtcgaaaacggcggcagaccagcatgacagatttctaccactccaaacgccggctgatcttctccaagaggaagccctaatccgcccacaggaagcctgcagtcctggaagcgcgagggcctcaaaggcccgctctacatcttctgccttagtctcagtttgtgtgtcttaattattatttgtgttttaatttaaacacctcctcatgtacataccctggccgccccctgccccccagcctctggcattagaattatttaaacaaaaactaggcggttgaatgagaggttcctaagagtgctgggcatttttattttatgaaatactatttaaagcctcctcatcccgtgttctccttttcctctctcccggaggttgggtgggccggcttcatgccagctacttcctcctccccacttgtccgctgggtggtaccctctggaggggtgtggctccttcccatcgctgtcacaggcggttatgaaattcaccccctttcctggacactcagacctgaattctttttcatttgagaagtaaacagatggcactttgaaggggcctcaccgagtgggggcatcatcaaaaactttggagtcccctcacctcctctaaggttgggcagggtgaccctgaagtgagcacagcctagggctgagctggggacctggtaccctcctggctcttgatacccccctctgtcttgtgaaggcagggggaaggtggggtcctggagcagaccaccccgcctgccctcatggcccctctgacctgcactggggagcccgtctcagtgttgagccttttccctctttggctcccctgtaccttttgaggagccccagctacccttcttctccagctgggctctgcaattcccctctgctgctgtccctcccccttgtcctttcccttcagtaccctctcagctccaggtggctctgaggtgcctgtcccacccccacccccagctcaatggactggaaggggaagggacacacaagaagaagggcaccctagttctacctcaggcagctcaagcagcgaccgccccctcctctagctgtgggggtgagggtcccatgtggtggcacaggcccccttgagtggggttatctctgtgttaggggtatatgatgggggagtagatctttctaggagggagacactggcccctcaaatcgtccagcgaccttcctcatccaccccatccctccccagttcattgcactttgattagcagcggaacaaggagtcagacattttaagatggtggcagtagaggctatggacagggcatgccacgtgggctcatatggggctgggagtagttgtctttcctggcactaacgttgagcccctggaggcactgaagtgcttagtgtacttggagtattggggtctgaccccaaacaccttccagctcctgtaacatactggcctggactgttttctctcggctccccatgtgtcctggttcccgtttctccacctagactgtaaacctctcgagggcagggaccacaccctgtactgttctgtgtctttcacagctcctcccacaatgctgaatatacagcaggtgctcaataaatgattcttagtgactttaaaaaaaaaaaaaaaaaaaa

SEQ ID NO: 193 - protein, 164 aa, Homo sapien
MSEPAGDVRQNPCGSKACRRLFGPVDSEQLSRDCDALMAGCIQEARERWNFDFVTETPLEGDFAWERVRGLGLPKLYLPTGPRRGRDELGGGRRPGTSPALLQGTAEEDHVDLSLSCTLVPRSGEQAEGSPGGPGDSQGRKRRQTSMTDFYHSKRRLIFSKRKP

SEQ ID NO: 194 - DNA, 3110 bp, Homo sapien
gtggaacctcgatattggtggtgtccatcgtgggcagcggactaataaaggccatggcgccagcagaaatcctgaacgggaaggagatctccgcgcaaataagggcgagactgaaaaatcaagtcactcagttgaaggagcaagtacctggtttcacaccacgcctggcaatattacaggttggcaacagagatgattccaatctttatataaatgtgaagctgaaggctgctgaagagattgggatcaaagccactcacattaagttaccaagaacaaccacagaatctgaggtgatgaagtacattacatctttgaatgaagactctactgtacatgggttcttagtgcagctacctttagattcagagaattccattaacactgaagaagtgatcaatgctattgcacccgagaaggatgtggatggattgactagcatcaatgctgggagacttgctagaggtgacctcaatgactgtttcattccttgtacgcctaagggatgcttggaactcatcaaagagacaggggtgccgattgccggaaggcatgctgtggtggttgggcgcagtaaaatagttggggccccgatgcatgacttgcttctgtggaacaatgccacagtgaccacctgccactccaagactgcccatctggatgaggaggtaaataaaggtgacatcctggtggttgcaactggtcagcctgaaatggttaaaggggagtggatcaaacctggggcaatagtcatcgactgtggaatcaattatgtcccagatgataaaaaaccaaatgggagaaaagttgtgggtgatgtggcatacgacgaggccaaagagagggcgagcttcatcactcctgttcctggcggcgtagggcccatgacagttgcaatgctcatgcagagcacagtagagagtgccaagcgtttcctggagaaatttaagccaggaaagtggatgattcagtataacaaccttaacctcaagacacctgttccaagtgacattgatatatcacgatcttgtaaaccgaagcccattggtaagctggctcgagaaattggtctgctgtctgaagaggtagaattatatggtgaaacaaaggccaaagttctgctgtcagcactagaacgcctgaagcaccggcctgatgggaaatacgtggtggtgactggaataactccaacacccctgggagaagggaaaagcacaactacaatcgggctagtgcaagcccttggtgcccatctctaccagaatgtctttgcgtgtgtgcgacagccttctcagggccccacctttggaataaaaggtggcgctgcaggaggcggctactcccaggtcattcctatggaagagtttaatctccacctcacaggtgacatccatgccatcactgcagctaataacctcgttgctgcggccattgatgctcggatatttcatgaactgacccagacagacaaggctctctttaatcgtttggtgccatcagtaaatggagtgagaaggttctctgacatccaaatccgaaggttaaagagactaggcattgaaaagactgaccctaccacactgacagatgaagagataaacagatttgcaagattggacattgatccagaaaccataacttggcaaagagtgttggataccaatgatagattcctgaggaagatcacgattggacaggctccaacggagaagggtcacacacggacggcccagtttgatatctctgtggccagtgaaattatggctgtcctggctctcaccacttctctagaagacatgagagagagactgggcaaaatggtggtggcatccagtaagaaaggagagcccgtcagtgccgaagatctgggggtgagtggtgcactgacagtgcttatgaaggacgcaatcaagcccaatctcatgcagacactggagggcactccagtgtttgtccatgctggcccgtttgccaacatcgcacatggcaattcctccatcattgcagaccagatcgcactcaagcttgttggcccagaagggtttgtagtgacggaagcaggatttggagcagacattggaatggaaaagttttttaacatcaaatgccggtattccggcctctgcccccacgtggtggtgcttgttgccactgtcagggctctcaagatgcacgggggcggccccacggtcactgctggactgcctcttcccaaggcttacatacaggagaacctggagctggttgaaaaaggcttcagtaacttgaagaaacaaattgaaaatgccagaatgtttggaattccagtagtagtggccgtgaatgcattcaagacggatacagagtctgagctggacctcatcagccgcctttccagagaacatggggcttttgatgccgtgaagtgcactcactgggcagaagggggcaagggtgccttagccctggctcaggccgtccagagagcagcacaagcacccagcagcttccagctcctttatgacctcaagctcccagttgaggataaaatcaggatcattgcacagaagatctatggagcagatgacattgaattacttcccgaagctcaacacaaagctgaagtctacacgaagcagggctttgggaatctccccatctgcatggctaaaacacacttgtctttgtctcacaacccagagcaaaaaggtgtccctacaggcttcattctgcccattcgcgacatccgcgccagcgttggggctggttttctgtaccccttagtaggaacgatgagcacaatgcctggactccccacccggccctgtttttatgatattgatttggaccctgaaacagaacaggtgaatggattattctaaacagatcaccatccatcttcaagaagctactttgaaagtctggccagtgtctattcaggcccactgggagttaggaagtataagtaagccaagagaagtcagcccctgcccagaagatctgaaactaatagtaggagtttccccagaagtcattttcagccttaattctcatcatgtataaattaacataaatcatgcatgtctgtttactttagtgacgttccacagaataaaaggaaacaagtttgc

SEQ ID NO: 195 - protein, 935 aa, Homo sapien
MAPAEILNGKEISAQIRARLKNQVTQLKEQVPGFTPRLAILQVGNRDDSNLYINVKLKAAEEIGIKATHIKLPRTTTESEVMKYITSLNEDSTVHGFLVQLPLDSENSINTEEVINAIAPEKDVDGLTSINAGRLARGDLNDCFIPCTPKGCLELIKETGVPIAGRHAVVVGRSKIVGAPMHDLLLWNNATVTTCHSKTAHLDEEVNKGDILVVATGQPEMVKGEWIKPGAIVIDCGINYVPDDKKPNGRKVVGDVAYDEAKERASFITPVPGGVGPMTVAMLMQSTVESAKRFLEKFKPGKWMIQYNNLNLKTPVPSDIDISRSCKPKPIGKLAREIGLLSEEVELYGETKAKVLLSALERLKHRPDGKYVVVTGITPTPLGEGKSTTTIGLVQALGAHLYQNVFACVRQPSQGPTFGIKGGAAGGGYSQVIPMEEFNLHLTGDIHAITAANNLVAAAIDARIFHELTQTDKALFNRLVPSVNGVRRFSDIQIRRLKRLGIEKTDPTTLTDEEINRFARLDIDPETITWQRVLDTNDRFLRKITIGQAPTEKGHTRTAQFDISVASEIMAVLALTTSLEDMRERLGKMVVASSKKGEPVSAEDLGVSGALTVLMKDAIKPNLMQTLEGTPVFVHAGPFANIAHGNSSIIADQIALKLVGPEGFVVTEAGFGADIGMEKFFNIKCRYSGLCPHVVVLVATVRALKMHGGGPTVTAGLPLPKAYIQENLELVEKGFSNLKKQIENARMFGIPVVVAVNAFKTDTESELDLISRLSREHGAFDAVKCTHWAEGGKGALALAQAVQRAAQAPSSFQLLYDLKLPVEDKIRIIAQKIYGADDIELLPEAQHKAEVYTKQGFGNLPICMAKTHLSLSHNPEQKGVPTGFILPIRDIRASVGAGFLYPLVGTMSTMPGLPTRPCFYDIDLDPETEQVNGLF

SEQ ID NO: 196 - DNA, 3381 bp, Homo sapien
cgcgattctcagggattgatccgcctcttcaggtaagttatcttccggccccgtaccactgtgccacaggcgcagcccgcttcctcaggtgccctatcccgcgcagaagaccacggcttcacagagtgttatttaagggcgtggccagcggaacatcccgccccattctgtgacgcacggggtggcgcgcgtgggacccgaggggtggggctgggtttagtaggagacctggggcaaggccccctgtggacgaccatctgccagcttctctcgttccgtcgattgggaggagcggtggcgacctcggccttcagtgtttccgacggagtgaatggcggcggcggctgggatgctgctgctgggcttgctgcaggcgggtgggtcggtgctgggccaggcgatggagaaggtgacaggcggcaacctcttgtccatgctgctgatcgcctgcgccttcaccctcagcctggtctacctgatccgtctggccgccggccacctggtccagctgcccgcaggggtgaaaagtcctccatacattttctccccaattccattccttgggcatgccatagcatttgggaaaagtccaattgaatttctagaaaatgcatatgagaagtatggacctgtatttagttttaccatggtaggcaagacatttacttaccttctggggagtgatgctgctgcactgctttttaatagtaaaaatgaagacctgaatgcagaagatgtctacagtcgcctgacaacacctgtgtttgggaagggagttgcatacgatgtgcctaatccagttttcttggagcagaagaaaatgttaaaaagtggccttaacatagcccactttaaacagcatgtttctataattgaaaaagaaacaaaggaatactttgagagttggggagaaagtggagaaaaaaatgtgtttgaagctctttctgagctcataattttaacagctagccattgtttgcatggaaaggaaatcagaagtcaactcaatgaaaaggtagcacagctgtatgcagatttggatggaggtttcagccatgcagcctggctcttaccaggttggctgcctttgcctagtttcagacgcagggacagagctcatcgggaaatcaaggatattttctataaggcaatccagaaacgcagacagtctcaagaaaaaattgatgacattctccaaactttactagatgctacatacaaggatgggcgtcctttgactgatgatgaagtagcagggatgcttattggattactcttggcagggcagcatacatcctcaactactagtgcttggatgggcttctttttggccagagacaaaacacttcaaaaaaaatgttatttagaacagaaaacagtctgtggagagaatctgcctcctttaacttatgaccagctcaaggatctaaatttacttgatcgctgtataaaagaaacattaagacttagacctcctataatgatcatgatgagaatggccagaactcctcagactgtggcagggtataccattcctccaggacatcaggtgtgtgtttctcccactgtcaatcaaagacttaaagactcatgggtagaacgcctggactttaatcctgatcgctacttacaggataacccagcatcaggggaaaagtttgcctatgtgccatttggagctgggcgtcatcgttgtattggggaaaattttgcctatgttcaaattaagacaatttggtccactatgcttcgtttatatgaatttgatctcattgatggatactttcccactgtgaattatacaactatgattcacacccctgagaacccagttatccgttacaaacgaagatcaaaatgaaaaaggttgcaaggaacgaatatatgtgattatcactgtaagccacaaaggcattcgaagagaatgaagtgtacaaaacaactcttgtagtttactgtttttttaagtgtgtaattctaaaagccagtttatgatttaggattttgttaactgaatggttctatcaaatataatagcatttgacacattttctaatagttatgatacttatacatgtgctttcaggaagttccttggtgaaacaattgttgaggggggatctaggtaattggcagattctaaataatataatttccagatagtaattttaagagtactcatcgctcttgccaaataagttcagggtattcaaatcttggactagtcctgcaaggtataaagaataaaaatcccagtgagatacttggaaaccacagtttattattatttatctgggcaattattgtgtgtgtgaggatggaagggtagggaataatcgaacatctaaagccttgaataagagaatactaattgttttggtatgatgatactcagaaatggagatattataggaaaaagaaatcctttggaattttaactaaaatcactgcatatgggaaattaagagatccaggaccatatttgataagagttcctaaaaataatgtaattattaatgctaaagactgctcatgtatcttgatctaattactaaataaattacatatttatttacctgataaatatgtatctagttctacaaggtcacatttatgtggaagtccaaagtcaagtccttaggggataattttgttttgggctcagttgttccctgcttccttttttttttttttttttttttgagatggagtctcgctctgttgcccaggctggagtgcagtggtgcgatctcagctcactgcatcctctgcctcccgggttcaagcaattctctgcctcagcctcccaagtagttgggattacaggcacctgccaccatgcctggctaattttttgtatttttagtagagacgggggtttcactatgttggctaggctggtcttgaactcctgagcctcgtgagtccacccgccttggcctcccaaagtgctgggattacaggcatgagccaccgcacctggccttccctgcttcctctctagaatccaattagggatgtttgttactactcatattgattaaaacagttaacaaacttttttctttttaaaatgtgagatcagtgaactctggttttaagataatctgaaacaaggtccttgggagtaataaaattggtcacattctgtaaagcacattctgtttaggaatcaacttatctcaaattgtaactcggggcctaactatatgagatggctgaaaaaataccacatcgtctgttttcactaggtgatgccaaaatattttgctttatgtatattacagttctttttaaaacactggaagactcatgttaaactctaattgtgaaggcagaatctctgctaatttttcagattaaaattctctttgaaaaaat

SEQ ID NO: 197 - protein, 509 aa, Homo sapien
MAAAAGMLLLGLLQAGGSVLGQAMEKVTGGNLLSMLLIACAFTLSLVYLIRLAAGHLVQLPAGVKSPPYIFSPIPFLGHAIAFGKSPIEFLENAYEKYGPVFSFTMVGKTFTYLLGSDAAALLFNSKNEDLNAEDVYSRLTTPVFGKGVAYDVPNPVFLEQKKMLKSGLNIAHFKQHVSIIEKETKEYFESWGESGEKNVFEALSELIILTASHCLHGKEIRSQLNEKVAQLYADLDGGFSHAAWLLPGWLPLPSFRRRDRAHREIKDIFYKAIQKRRQSQEKIDDILQTLLDATYKDGRPLTDDEVAGMLIGLLLAGQHTSSTTSAWMGFFLARDKTLQKKCYLEQKTVCGENLPPLTYDQLKDLNLLDRCIKETLRLRPPIMIMMRMARTPQTVAGYTIPPGHQVCVSPTVNQRLKDSWVERLDFNPDRYLQDNPASGEKFAYVPFGAGRHRCIGENFAYVQIKTIWSTMLRLYEFDLIDGYFPTVNYTTMIHTPENPVIRYKRRSK

SEQ ID NO: 198 - DNA, 2081 bp, Homo sapien
tcgggaagccatagggcgcctcccagcccgtctccccgctccagtttagaacctaattcccaattcccggaccgggcccagccctgggctcttactgtccgcttttgctgggacctgttccacaaatgggcgtcttctgccttgggccgtgggggttgggccggaagctgcggacgcctgggaaggggccgctgcagctcttgagccgcctctgcggggaccacttgcaggccatcccagccaagaaggccccggctgggcaggaggagcctgggacgccgccctcctcgccgctgagtgccgagcagttggaccggatccagaggaacaaggccgcggccctgctcagactcgcggcccgcaacgtgcccgtgggctttggagagagctggaagaagcacctcagcggggagttcgggaaaccgtattttatcaagctaatgggatttgttgcagaagaaagaaagcattacactgtttatccacccccacaccaagtcttcacctggacccagatgtgtgacataaaagatgtgaaggttgtcatcctgggacaggatccatatcatggacctaatcaagctcacgggctctgctttagtgttcaaaggcctgttccgcctccgcccagtttggagaacatttataaagagttgtctacagacatagaggattttgttcatcctggccatggagatttatctgggtgggccaagcaaggtgttctccttctcaacgctgtcctcacggttcgtgcccatcaagccaactctcataaggagcgaggctgggagcagttcactgatgcagttgtgtcctggctaaatcagaactcgaatggccttgttttcttgctctggggctcttatgctcagaagaagggcagtgccattgataggaagcggcaccatgtactacagacggctcatccctcccctttgtcagtgtatagagggttctttggatgtagacacttttcaaagaccaatgagctgctgcagaagtctggcaagaagcccattgactggaaggagctgtgatcatcagctgaggggtggcctttgagaagctgctgttaacgtatttgccagttacgaagttccactgaaaattttcctattaattcttaagtactctgcataagggggaaaagcttccagaaagcagccatgaaccaggctgtccaggaatggcagctgtatccaaccacaaacaacaaaggctaccctttgaccaaatgtctttctctgcaacatggcttcggcctaaaatatgcagaagacagatgaggtcaaatactcagttggctctctttatctcccttgcctttatggtgaaacaggggagatgtgcacctttcaggcacagccctagtttggcgcctgctgctccttggttttgcctggttagactttcagtgacagatgttggggtgtttttgcttagaaaggtccccttgtctcagccttgcagggcaggcatgccagtctctgccagttccactgcccccttgatctttgaaggagtcctcaggcccctcgcagcataaggatgttttgcaactttccagaatctggcccagaaattagggctcaatttcctgattgtagtagaggttaagattgctgtgagctttatcagataagagaccgagagaagtaagctgggtcttgttattccttgggtgttggtggaataagcagtggaatttgaacaaggaagaggagaaaagggaattttgtctttatggggtggggtgattttctcctagggttatgtccagttggggtttttaaggcagcacagactgccaagtactgttttttttaaccgactgaaatcactttgggatattttttcctgcaacactggaaagttttagttttttaagaagtactcatgcagatatatatatatatatttttcccagtcctttttttaagagacggtctttattgggtctgcacctccatccttgatcttgttagcaatgctgtttttgctgttagtcgggttagagttggctctacgcgaggtttgttaataaaagtttgttaaaagtttaaaaaaaaaaaaaaaaa

SEQ ID NO: 199 - protein, 313 aa, Homo sapien
MIGQKTLYSFFSPSPARKRHAPSPEPAVQGTGVAGVPEESGDAAAIPAKKAPAGQEEPGTPPSSPLSAEQLDRIQRNKAAALLRLAARNVPVGFGESWKKHLSGEFGKPYFIKLMGFVAEERKHYTVYPPPHQVFTWTQMCDIKDVKVVILGQDPYHGPNQAHGLCFSVQRPVPPPPSLENIYKELSTDIEDFVHPGHGDLSGWAKQGVLLLNAVLTVRAHQANSHKERGWEQFTDAVVSWLNQNSNGLVFLLWGSYAQKKGSAIDRKRHHVLQTAHPSPLSVYRGFFGCRHFSKTNELLQKSGKKPIDWKEL

SEQ ID NO: 200 - DNA, 662 bp, Homo sapien
accgccgacgcagacccctctctgcacgccagcccgcccgcacccaccatggccacagttcagcagctggaaggaagatggcgcctggtggacagcaaaggctttgatgaatacatgaaggagctaggagtgggaatagctttgcgaaaaatgggcgcaatggccaagccagattgtatcatcacttgtgatggtaaaaacctcaccataaaaactgagagcactttgaaaacaacacagttttcttgtaccctgggagagaagtttgaagaaaccacagctgatggcagaaaaactcagactgtctgcaactttacagatggtgcattggttcagcatcaggagtgggatgggaaggaaagcacaataacaagaaaattgaaagatgggaaattagtggtggagtgtgtcatgaacaatgtcacctgtactcggatctatgaaaaagtagaataaaaattccatcatcactttggacaggagttaattaagagaatgaccaagctcagttcaatgagcaaatctccatactgtttctttcttttttttttcattactgtgttcaattatctttatcataaacattttacatgcagctatttcaaagtgtgttggattaattaggatcatccctttggttaataaataaatgtgtttgtgct

SEQ ID NO: 201 - protein, 135 aa, Homo sapien
MATVQQLEGRWRLVDSKGFDEYMKELGVGIALRKMGAMAKPDCIITCDGKNLTIKTESTLKTTQFSCTLGEKFEETTADGRKTQTVCNFTDGALVQHQEWDGKESTITRKLKDGKLVVECVMNNVTCTRIYEKVE

SEQ ID NO: 202 - DNA, 2643 bp, Homo sapien
gggactacatttcccagggggcagaggcaggggcgggagggggcgggccccggcgctgctcccgcccctcccccgtgctcgcggggagaggtaaacaaaccacgcgcgggctgcccgcggcacggcgggcgcggctggcgcggctggggcggcaggggcggcggagagcgcgccgagccgcggccgagctggcccgcccgcccgtcgcacatgttccggaacggcgcccggccgtagccgcctgcggcgcctcctgtcggcccgagaagggagtgcggagaggcgccggtcgccacccgcggtgcccatggagcgggtgaagatgatcaacgtgcagcgtctgctggaggctgccgagtttttggagcgccgggagcgagagtgtgaacatggctacgcctcttcattcccgtccatgccgagcccccgactgcagcattcaaagcccccacggaggttgagccgggcacagaaacacagcagcgggagcagcaacaccagcactgccaacagatctacacacaatgagctggaaaagaatcgacgagctcatctgcgcctttgtttagaacgcttaaaagttctgattccactaggaccagactgcacccggcacacaacacttggtttgctcaacaaagccaaagcacacatcaagaaacttgaagaagctgaaagaaaaagccagcaccagctcgagaatttggaacgagaacagagatttttaaagtggcgactggaacagctgcagggtcctcaggagatggaacgaatacgaatggacagcattggatcaactatttcttcagatcgttctgattcagagcgagaggagattgaagtggatgttgaaagcacagagttctcccatggagaagtggacaatataagtaccaccagcatcagtgacattgatgaccacagcagcctgccgagtattgggagtgacgagggttactccagtgccagtgtcaaactttcattcacttcatagaacccagcatgacataacagtgcagggcaaaatattcactgggccaattcaatacaaacaatctcttaaattgggttcatgatgcagtctcctctttaaaacaaaacaaaacaaaacaaaactatacttgaacaaaagggtcagaggacctgtatttaagcaaatacttagcaaaaagtggggcagagcctcccaaggagaacaaatattcagaatattcatattggaaaaatcacaatttttaatggcagcagaaaacttgtgtgaaattttcttgatttgagttgattgagaagaggacattggagatgccatcctctttctcttttctagtttgctcatactacattgagtagacacatttaaggatggggttatgaacccttcctgagctttatggtcctaaaagcaaaataaaaactattcgaatgaaaagacaagaaaatcaggtattaatcttggatagctaataatgagctattaaaactcagcctgggacagtttatcatgaagcctgtggatgatcaatcctttattattattttttttttttgaaaaaagctcatttcatgctctgcaaaaggagagactcccatgaagccttttgaaagggatcatcatgcagctcaactttctgttggattccatgctaagcaagctaaccttatcctgcattgttagcactaggcacccagctgccacctctccatcctgctgcccttaggccacatgggagcagtccatgcatgacagcctctatcctacaaggcctatgagtatggattgggggggccaaaaggaaaaagctccatgtgcctctttgtctgcgtgggtcagaagagttgtgcacgcagattagcaggccaaggtctgagccacagcagcatttttatttcagattttgataactgtttatatgtgttgaaaaccaaaatgacatctttttaaagcttatccataaaaaaaaatagatgtcttttatagtggaaaaacacatggggaaaaaaatcatctattttgatgcagcatttgataatgataaaacacctcacacctcactctttatagtgcacaaaatgaatgaggtctgggctaggtagaaaaagggtcaatgctatttttgtttttagaatcattaccttttaccagcttttaaccatctgatatctatagtagacacactatcatagttaacatagttaagttcagcacttgtctcattttaatgtaaagatttgcttccattttcctacaggcagtctctctcttcctcacagtcccactgtgcaggtgctattgttactcttacgaatattttcagtaatgttattttcttctaagtgaaatttctagcctgcactttgatgtcatgtgttccctttgtctttcaaactccaaggttcccctgtggccctctcccttaccctgggaaggcctcttggagaccttacccctggctgtttggactttgtatactttaaataatttaactacccttaattacttaaaaaaaaaaaaaagctttatgattttcataacttattgctgattttaatggattgttaatttcagtcctgtagttttattttatgtttagatagggctgggcaaggaaaaagaaaataaagacaaccatatttagcagtgca

SEQ ID NO: 203 - protein, 228 aa, Homo sapien
MERVKMINVQRLLEAAEFLERRERECEHGYASSFPSMPSPRLQHSKPPRRLSRAQKHSSGSSNTSTANRSTHNELEKNRRAHLRLCLERLKVLIPLGPDCTRHTTLGLLNKAKAHIKKLEEAERKSQHQLENLEREQRFLKWRLEQLQGPQEMERIRMDSIGSTISSDRSDSEREEIEVDVESTEFSHGEVDNISTTSISDIDDHSSLPSIGSDEGYSSASVKLSFTS

SEQ ID NO: 204 - DNA, 6974 bp, Homo sapien
cggtgctggagaagtttgcgctgcggttcgtgagcgcagggtgcgggccccgccggccgctgcgcgcccgctgccatggctttccgcaggaggacgaaaagttacccgctcttcagccaggagttcgtcatccacaaccatgcggacatcggcttctgcctggtgctctgcgtcctcatcgggcttatgttcgaggtcacagccaagactgcctttctatttattttacctcagtataacattagcgtgcctacagcagacagtgagaccgtgcactaccactatggccctaaggacctggtcacaatcttgttctacatcttcatcaccatcatcttgcatgctgtggttcaggagtacattttagataaaatcagcaaacggcttcatctctccaaagtcaaacacagcaagttcaatgaatctggacagctggtcgtctttcatttcacctcggtgatttggtgcttctacgtggtggtgacggaaggatacttaacaaacccaagaagcctctgggaagactacccgcatgtgcacctccccttccaggtgaagtttttctacctatgccagctggcctactggctgcacgcacttcctgagctatacttccagaaggtacggaaggaggaaattccccgccagctccagtatatttgcctgtacctggtgcatatagctggagcatacctcttaaacctgagccgcctgggcctgatcttgctgctgctgcagtactcaactgagttcctcttccacacggctagactcttctactttgcagatgaaaacaacgagaaactgttcagtgcctgggctgctgtttttggggttacccgcctcttcatcctcacccttgccgtgctggccattggctttggactggctcgcatggaaaaccaggcatttgatcccgagaaagggaacttcaacactttgttttgcaggctctgcgtgctgctgctggtgtgtgccgcccaggcctggctcatgtggcgcttcatccactcccagctgcggcactggcgggaatactggaatgagcagagtgcaaagcggagagtcccagccacacccagactaccagccaggctcatcaagagggaatctggttaccatgaaaatggagtggtgaaggcagagaacggaacctccccacggactaagaaactcaagtctccctaaggccaaagtgctaagaacaggaatcctcttggtgggggccgagcagggggcaaggagcccaggccccctccctgcctcctccttcctgcctgtgatgctccgtctcaaacagccgaaacctgtcttgcaatggggggagggggcgtttcgctttccttcttcttggcttcctcttattcttccacaaaccattctcaataaagccaaaaatctttctctttctccccctcaggccacctcctgtcctcactcctgtcctgtgctggcttttctggaacgccaggcgcccatggctggcacctttctgcttgctctgtttcttgccttatggctgctgcttttcctttttacttcctattttcaccttatcttgcaatttttctgtctgatttttacaatgggaggggagctaagattgcagtcctgtccttcggtcccccagggcctgccggtcagaagcctggggctggtaggcccttggtggtcctcatgtggatgggcaagaagagagcggccatctcggatcataatctccttggtgctgattaactgacgagatatatgattccagttctgcatgtaccatcttgaggcacagcagccactgctcgttgtaaatgccaaggcatttggctttgggacgtgacaactcaatccagaaggatggtgtgaactcggttgggtcccgtgactcgagctcctaccagtggctggccgcggattggaagccagcctgctgtcgctctgtggggaggacatgtcttcccactgcttagagcgagagcagagcaaactgcgcagcaggcacctccagaaaggtaatggtggcagaacccacagtggagtcgacctaggcctttctccagcagtcccagtcgccattgctttttcagccattcacaagcattcaaaaccaaaccaaacagcagttcatatacctgcctgagataggctggtcctcacctccagagccagccagccccgtcaggggccaaacttactaccttgacttcatctctagctgcagaaacactaagtctcaagggcttcagccccatgctggtcccttggtgttcagggagggtcacttggaccgctgttcatctggccgcccttgttgagtgttctttggaattgtcgttttttgagcacaactacagcattttagactgcatgaaaccatgactgactgagagtcactctctgggtagatgataggcgcctttctggccccttccctcacagattctttcccctcccctccacctgaagagaaggcctccaagtccttttggtgccttgtgaggacttttagaaggggcgttcagctttaaaaagccggtcctaattacggccggacgcagtagcttacgcctgttatcccagcactttgggaggtcgaggtgggcagatcacctgaggttaggagttcaagaccagcctggccaacatggtgaaaccccatctctactaaaaatacaaaaaattaggtgtagtggcaggcacctgtaatcccagctactcgggaggctgaggcaggagaatcgcttgaacctagaaggtggaggttgcagtgagcggagattgtaccatggcactccagcctggacaacaagagcgaaattctgtctaaaaaaacaaaagtcccaattaagaacctccgaactctgttttgaggcaaaggggagtagttcttggtaggtgcaggaatagtagtgtcatttggaatactggtcatctttctgacatcacagtagaaaccaaaccttggatttagattcaaaaggggggaaatgggtcttttcatcaaggcaactccccttctccaagtcacttacatcatagataaattttagcttcccagtaactgagggatttgtttcctaacgccattggaggccttcatccctctctacgataaggttgcagaaatgggaagagctacccgtggttgcttttgattacccttaggaagtgagacagtgtttttgaaaatatgtatttctcccatttctccctctccttccctgacacttctctgggctgcacagcagaaacgttggtaaaagggcagtttggtttcaacacagcagacctgatatgggatcccttagccactttagtcaaacagccctgacagagtctataattgagttcaggccccccaccttgcctaataactgcaaatcgcatgttcagccagcagcctcctaagcccaccttcctcccccattagagaacacccatcctaggtgctctccaggctgtgtcattggcagggcttcacatgcaggaggcctctctcaggtgagtccaggttaaactgttgagttgtggcttcaacagatatgtatggcatgctgggatgtgccaggtgcctgcgttgtgccagttgctggagaggtagtgtgagcagagcagctgaaatcttgccatcaagcaaccctcattctcatgcctgtaggtttccattgctctgtcccaggacacttgcgtgccagagacgccacaacttcatgtccctgtctcttgcaagctccccgtgctgccagtacttcatgccttggatgtggtcccaccagcccagtggctggggtcagcttaggctctgcttcccagtggacgggtgtgctaagggtttattttatgtaaaaaaaaaaaaaaaacaaaaaaaaaccctgagaccatgagtggggctggcatcttgccagcctgggcttcagggatgtttggggggggtggttagagggtagttgtagggtactttgtcacccccctccccctgccaccctccctggcacgtttatttcacagcagagccaagtctgtggcaggttgacacagactgtgttgccagagctgaaataattccacttcatcctatgagcgtgttgggctagcttgttctaattttggccactttggctgttttcttcagttttatgcattctctcctgccccaaagtgccaagccatttgtgaaggctctgccagacacctccaagcttgagagctcagcaccatgcaccaagagcaggagaaaagacgtaaacctaccccagcaactgtggcctctcgacagccctggctaactaacttacatttgtggggaagccaacagacacagcaggaggagagggaggtggcgctggtggaccaaggatctgtgctacccgctcccctccttggaggtgcagtgatgatgggagttatttttaccatccgggcgctgatagctgcactattaataaattgcatgtgttccttttgaaggtaggggatggttctgggtgagaggggagcaggctgagccggcgggggatctgctgtcctcccttttgagtcagttctaatcccatgtgtgtctgggccaccagaccgaaatggttgctgagaaacttgtctgttcatgtcccaaggcataacttcccaacatttaagaaaccccaatagacacctctgccctggccacgttcacagatccttctcttgaccggaaaccctgggaccctaagaacccctgaagcttggggtgggtgtgtgcttctggggtctcttttgggacctcctttgtcagtaccccttcttttttctaagcagctaataagaggttgggtgaaagagtgcatctcctcccaggattccacaacaaaattcttatcttccatggatgctttaattggaagtgggttgccgacccccttgtgcctagaaaaggcctttgcttgggtttcctttgtatgcttcagccttcctagttggtttttctaggcctggtgtgagaggtagggaagtctgcacataactaattcttttgcttaagggcctatggcacaagtgcacaaacttcaattcttgatgttctaagctctctcctctaacagagggagtgctgaaagcttttgagtcaagacaatggagtgctcttcctccctcactctgccttccgagcttatggttccttttctcaggagaggattttcaggattattggaggattaggtcattgtcagatgactggaaaacctaaataggatctctctccagctcaaggttgtcccagtgaggaagactttaccaacttctcactctaccccactactcacatgagtgttagctccaccttgcaaaggctgaagaccagttctccccagtgaaagctgcctcattcttttatggagttccctggagtggcagagctataaagacgagcattgggatttgcagtctccatgtagcctttcgtgcttggcaacccctgtagactttttgtcccaagcagattgcgtgcgtgcgcctgtgtgtgagaataagtgccttactttgctgtgtggttttcaacttgtactccgtggccagcccccagttgccagggctcgacggcagccaaggacaccatacctcagtatagttatatataaaatggacacggattgtgacagtttcaccccatttgtttctaaccccgctgcccaggattagggtctgtggtgtgttctgttttgtttttggtttctcccttgtgtcagttctcttctggcccagctgggtggctgtggaagtctgtgaggtggcccaaccacaagcatacctattaagagaagcccagagcttccagcccccacttcgaaaactctcctctggccccacatagcaaactccttctccgttattttccccacccccagattttttttaaaaggcccacttgccataacctcttttggtctattttgcttcccattcagcccaaagtttatatgataaaggtgtttacttttacttcccagtctccaagtgctaacacataaacacatacatgtctgactgttgcagaactgttcgagctcctaattcagtgttaccttgttttagtcgcagcaaccctctcccctaccccttgcccgcccacgtttttctcactcttccgggttgtgcaataactctcccagccagtggtcctttccacagcctttctgtcccttaaaacacctgcaactgggggagaaatgggacccatgggagggggagtcatcatcccttacacaagaaatagccactttccttttgttgtcattcttgtgatcctgggtgggtttctgtggcactcttttagaacatgtagcatcatcttagaggtctatttttaaaaaatgtgttgaagaggaaaaaaccattctcacgatggggcttaagtcattgtccaggaataagattggcgtggtgcccatgacatcaccgtcactctgcctaaaagcactctagagctacttgttcacgtggagaggaaggatattttgcgaagcaacagccgcaggtggagagccctgttcacctgatagggtctagctgtgacagtaaatataataccgctgtttccttgggtacagatttgagtgttcatgtgatgagactgtaaacctcatttttcggttcctctgtttaaaaaaacatctgaaggatgaactaaggctgctggtgccctgagcaactgataatgcaaatgtggacaaagtgtctgttttctactctagcctgttcatatggaccaaatttcaacaaggaactcaaggaaaatttgtacctgccgtatttatgctttcatgtaaaaaagggttggggggaggggtgtctttttgcttttggtgaactttttttcaaaatcatttttccactgtttctgtctggttttaaaacaaattacagttttgtatggattttttaaatgtacattttggaacaaatgatcaaatattttctgaaataacaataaaaggcagaaaatt

SEQ ID NO: 205 - protein, 370 aa, Homo sapien
MAFRRRTKSYPLFSQEFVIHNHADIGFCLVLCVLIGLMFEVTAKTAFLFILPQYNISVPTADSETVHYHYGPKDLVTILFYIFITIILHAVVQEYILDKISKRLHLSKVKHSKFNESGQLVVFHFTSVIWCFYVVVTEGYLTNPRSLWEDYPHVHLPFQVKFFYLCQLAYWLHALPELYFQKVRKEEIPRQLQYICLYLVHIAGAYLLNLSRLGLILLLLQYSTEFLFHTARLFYFADENNEKLFSAWAAVFGVTRLFILTLAVLAIGFGLARMENQAFDPEKGNFNTLFCRLCVLLLVCAAQAWLMWRFIHSQLRHWREYWNEQSAKRRVPATPRLPARLIKRESGYHENGVVKAENGTSPRTKKLKSP

SEQ ID NO: 206 - DNA, 1345 bp, Homo sapien
aaaacagccggggctccagcgggagaacgataatgcaaagtgctatgttcttggctgttcaacacgactgcagacccatggacaagagcgcaggcagtggccacaagagcgaggagaagcgagaaaagatgaaacggacccttttaaaagattggaagacccgtttgagctacttcttacaaaattcctctactcctgggaagcccaaaaccggcaaaaaaagcaaacagcaagctttcatcaagccttctcctgaggaagcacagctgtggtcagaagcatttgacgagctgctagccagcaaatatggtcttgctgcattcagggcttttttaaagtcggaattctgtgaagaaaatattgaattctggctggcctgtgaagacttcaaaaaaaccaaatcaccccaaaagctgtcctcaaaagcaaggaaaatatatactgacttcatagaaaaggaagctccaaaagagataaacatagattttcaaaccaaaactctgattgcccagaatatacaagaagctacaagtggctgctttacaactgcccagaaaagggtatacagcttgatggagaacaactcttatcctcgtttcttggagtcagaattctaccaggacttgtgtaaaaagccacaaatcaccacagagcctcatgctacatgaaatgtaaaagggagcccagaaatggaggacatttcattctttttcctgaggggaaggactgtgacctgccataaagactgaccttgaattcagcctgggtgttcaggaaacatcactcagaactattgattcaaagttgggtagtgaatcaggaagccagtaactgactaggagaagctggtatcagaacagcttccctcactgtgtacagaacgcaagaagggaataggtggtctgaacgtggtgtctcactctgaaaagcaggaatgtaagatgatgaaagagacaatgtaatactgttggtccaaaagcatttaaaatcaatagatctgggattatgtggccttaggtagctggttgtacatctttccctaaatcgatccatgttaccacatagtagttttagtttaggattcagtaacagtgaagtgtttactatgtgcaagggtattgaagttcttatgaccacagatcatcagtactgttgtctcatgtaatgctaaaactgaaatggtccgtgtttgcattgttaaaaatgatgtgtgaaatagaatgagtgctatggtgttgaaaactgcagtgtccgttatgagtgccaaaaatctgtcttgaaggcagctacactttgaagtggtctttgaatacttttaataaatttattttgataaataatattg

SEQ ID NO: 207 - protein, 211 aa, Homo sapien
MQSAMFLAVQHDCRPMDKSAGSGHKSEEKREKMKRTLLKDWKTRLSYFLQNSSTPGKPKTGKKSKQQAFIKPSPEEAQLWSEAFDELLASKYGLAAFRAFLKSEFCEENIEFWLACEDFKKTKSPQKLSSKARKIYTDFIEKEAPKEINIDFQTKTLIAQNIQEATSGCFTTAQKRVYSLMENNSYPRFLESEFYQDLCKKPQITTEPHAT

SEQ ID NO: 208 - DNA, 2121 bp, Homo sapien
ctgctcgcggccgccaccgccgggccccggccgtccctggctcccctcctgcctcgagaagggcagggcttctcagaggcttggcgggaaaaaagaacggagggagggatcgcgctgagtataaaagccggttttcggggctttatctaactcgctgtagtaattccagcgagaggcagagggagcgagcgggcggccggctagggtggaagagccgggcgagcagagctgcgctgcgggcgtcctgggaagggagatccggagcgaatagggggcttcgcctctggcccagccctcccgcttgatcccccaggccagcggtccgcaacccttgccgcatccacgaaactttgcccatagcagcgggcgggcactttgcactggaacttacaacacccgagcaaggacgcgactctcccgacgcggggaggctattctgcccatttggggacacttccccgccgctgccaggacccgcttctctgaaaggctctccttgcagctgcttagacgctggatttttttcgggtagtggaaaaccagcagcctcccgcgacgatgcccctcaacgttagcttcaccaacaggaactatgacctcgactacgactcggtgcagccgtatttctactgcgacgaggaggagaacttctaccagcagcagcagcagagcgagctgcagcccccggcgcccagcgaggatatctggaagaaattcgagctgctgcccaccccgcccctgtcccctagccgccgctccgggctctgctcgccctcctacgttgcggtcacacccttctcccttcggggagacaacgacggcggtggcgggagcttctccacggccgaccagctggagatggtgaccgagctgctgggaggagacatggtgaaccagagtttcatctgcgacccggacgacgagaccttcatcaaaaacatcatcatccaggactgtatgtggagcggcttctcggccgccgccaagctcgtctcagagaagctggcctcctaccaggctgcgcgcaaagacagcggcagcccgaaccccgcccgcggccacagcgtctgctccacctccagcttgtacctgcaggatctgagcgccgccgcctcagagtgcatcgacccctcggtggtcttcccctaccctctcaacgacagcagctcgcccaagtcctgcgcctcgcaagactccagcgccttctctccgtcctcggattctctgctctcctcgacggagtcctccccgcagggcagccccgagcccctggtgctccatgaggagacaccgcccaccaccagcagcgactctgaggaggaacaagaagatgaggaagaaatcgatgttgtttctgtggaaaagaggcaggctcctggcaaaaggtcagagtctggatcaccttctgctggaggccacagcaaacctcctcacagcccactggtcctcaagaggtgccacgtctccacacatcagcacaactacgcagcgcctccctccactcggaaggactatcctgctgccaagagggtcaagttggacagtgtcagagtcctgagacagatcagcaacaaccgaaaatgcaccagccccaggtcctcggacaccgaggagaatgtcaagaggcgaacacacaacgtcttggagcgccagaggaggaacgagctaaaacggagcttttttgccctgcgtgaccagatcccggagttggaaaacaatgaaaaggcccccaaggtagttatccttaaaaaagccacagcatacatcctgtccgtccaagcagaggagcaaaagctcatttctgaagaggacttgttgcggaaacgacgagaacagttgaaacacaaacttgaacagctacggaactcttgtgcgtaaggaaaagtaaggaaaacgattccttctaacagaaatgtcctgagcaatcacctatgaacttgtttcaaatgcatgatcaaatgcaacctcacaaccttggctgagtcttgagactgaaagatttagccataatgtaaactgcctcaaattggactttgggcataaaagaacttttttatgcttaccatcttttttttttctttaacagatttgtatttaagaattgtttttaaaaaattttaa

SEQ ID NO: 209 - protein, 439 aa, Homo sapien
MPLNVSFTNRNYDLDYDSVQPYFYCDEEENFYQQQQQSELQPPAPSEDIWKKFELLPTPPLSPSRRSGLCSPSYVAVTPFSLRGDNDGGGGSFSTADQLEMVTELLGGDMVNQSFICDPDDETFIKNIIIQDCMWSGFSAAAKLVSEKLASYQAARKDSGSPNPARGHSVCSTSSLYLQDLSAAASECIDPSVVFPYPLNDSSSPKSCASQDSSAFSPSSDSLLSSTESSPQGSPEPLVLHEETPPTTSSDSEEEQEDEEEIDVVSVEKRQAPGKRSESGSPSAGGHSKPPHSPLVLKRCHVSTHQHNYAAPPSTRKDYPAAKRVKLDSVRVLRQISNNRKCTSPRSSDTEENVKRRTHNVLERQRRNELKRSFFALRDQIPELENNEKAPKVVILKKATAYILSVQAEEQKLISEEDLLRKRREQLKHKLEQLRNSCA

SEQ ID NO: 210 - DNA, 1637 bp, Homo sapien
ggcaggcatgggagccgcgcgctctctcccggcgcccacacctgtctgagcggcgcagcgagccgcggcccgggcgggctgctcggcgcggaacagtgctcggcatggcagggattccagggctcctcttccttctcttctttctgctctgtgctgttgggcaagtgagcccttacagtgccccctggaaacccacttggcctgcataccgcctccctgtcgtcttgccccagtctaccctcaatttagccaagccagactttggagccgaagccaaattagaagtatcttcttcatgtggaccccagtgtcataagggaactccactgcccacttacgaagaggccaagcaatatctgtcttatgaaacgctctatgccaatggcagccgcacagagacgcaggtgggcatctacatcctcagcagtagtggagatggggcccaacaccgagactcagggtcttcaggaaagtctcgaaggaagcggcagatttatggctatgacagcaggttcagcatttttgggaaggacttcctgctcaactaccctttctcaacatcagtgaagttatccacgggctgcaccggcaccctggtggcagagaagcatgtcctcacagctgcccactgcatacacgatggaaaaacctatgtgaaaggaacccagaagcttcgagtgggcttcctaaagcccaagtttaaagatggtggtcgaggggccaacgactccacttcagccatgcccgagcagatgaaatttcagtggatccgggtgaaacgcacccatgtgcccaagggttggatcaagggcaatgccaatgacatcggcatggattatgattatgccctcctggaactcaaaaagccccacaagagaaaatttatgaagattggggtgagccctcctgctaagcagctgccagggggcagaattcacttctctggttatgacaatgaccgaccaggcaatttggtgtatcgcttctgtgacgtcaaagacgagacctatgacttgctctaccagcaatgcgatgcccagccaggggccagcgggtctggggtctatgtgaggatgtggaagagacagcagcagaagtgggagcgaaaaattattggcattttttcagggcaccagtgggtggacatgaatggttccccacaggatttcaacgtggctgtcagaatcactcctctcaaatatgcccagatttgctattggattaaaggaaactacctggattgtagggaggggtgacacagtgttccctcctggcagcaattaagggtcttcatgttcttattttaggagaggccaaattgttttttgtcattggcgtgcacacgtgtgtgtgtgtgtgtgtgtgtgtgtaaggtgtcttataatcttttacctatttcttacaattgcaagatgactggctttactatttgaaaactggtttgtgtatcatatcatatatcatttaagcagtttgaaggcatacttttgcatagaaataaaaaaaatactgatttggggcaatgaggaatatttgacaattaagttaatcttcacgtttttgcaaactttgatttttatttcatctgaacttgtttcaaagatttatattaaatatttggcatacaagagatatga

SEQ ID NO: 211 - protein, 383 aa, Homo sapien
MAGIPGLLFLLFFLLCAVGQVSPYSAPWKPTWPAYRLPVVLPQSTLNLAKPDFGAEAKLEVSSSCGPQCHKGTPLPTYEEAKQYLSYETLYANGSRTETQVGIYILSSSGDGAQHRDSGSSGKSRRKRQIYGYDSRFSIFGKDFLLNYPFSTSVKLSTGCTGTLVAEKHVLTAAHCIHDGKTYVKGTQKLRVGFLKPKFKDGGRGANDSTSAMPEQMKFQWIRVKRTHVPKGWIKGNANDIGMDYDYALLELKKPHKRKFMKIGVSPPAKQLPGGRIHFSGYDNDRPGNLVYRFCDVKDETYDLLYQQCDAQPGASGSGVYVRMWKRQQQKWERKIIGIFSGHQWVDMNGSPQDFNVAVRITPLKYAQICYWIKGNYLDCREG

SEQ ID NO: 212 - DNA, 4322 bp, Homo sapien
gggaccgacgacacgcccccctctcctcctttgttccgggggtcggcggccgctctcctgccagagctcgggatctcggccccgggaggcgggcgctcgggcgcagccgcgaagatgccgttggaactgacgcagagccgagtgcagaagatctgggtgcccgtggaccacaggccctcgttgcccagatcctgtgggccaaagctgaccaactcccccaccgtcatcgtcatggtgggcctccccgcccggggcaagacctacatctccaagaagctgactcgctacctcaactggattggcgtccccacaaaagtgttcaacgtcggggagtatcgccgggaggctgtgaagcagtacagctcctacaacttcttccgccccgacaatgaggaagccatgaaagtccggaagcaatgtgccttagctgccttgagagatgtcaaaagctacctggcgaaagaagggggacaaattgcggttttcgatgccaccaatactactagagagaggagacacatgatccttcattttgccaaagaaaatgactttaaagcgtttttcatcgagtcggtgtgcgacgaccctacagttgtggcctccaatatcatggaagttaaaatctccagcccggattacaaagactgcaactcggcagaagccatggacgacttcatgaagaggatcagttgctatgaagccagctaccagcccctcgaccccgacaaatgcgacagggacttgtcgctgatcaaggtgattgacgtgggccggaggttcctggtgaaccgggtgcaggaccacatccagagccgcatcgtgtactacctgatgaacatccacgtgcagccgcgtaccatctacctgtgccggcacggcgagaacgagcacaacctccagggccgcatcgggggcgactcaggcctgtccagccggggcaagaagtttgccagtgctctgagcaagttcgtggaggagcagaacctgaaggacctgcgcgtgtggaccagccagctgaagagcaccatccagacggccgaggcgctgcggctgccctacgagcagtggaaggcgctcaatgagatcgacgcgggcgtctgtgaggagctgacctacgaggagatcagggacacctaccctgaggagtatgcgctgcgggagcaggacaagtactattaccgctaccccaccggggagtcctaccaggacctggtccagcgcttggagccagtgatcatggagctggagcggcaggagaatgtgctggtcatctgccaccaggccgtcctgcgctgcctgcttgcctacttcctggataagagtgcagaggagatgccctacctgaaatgccctcttcacaccgtcctgaaactgacgcctgtcgcttatggctgccgtgtggaatccatctacctgaacgtggagtccgtctgcacacaccgggagaggtcagaggatgcaaagaagggacctaacccgctcatgagacgcaatagtgtcaccccgctagccagccccgaacccaccaaaaagcctcgcatcaacagctttgaggagcatgtggcctccacctcggccgccctgcccagctgcctgcccccggaggtgcccacgcagctgcctggacaaaacatgaaaggctcccggagcagcgctgactcctccaggaaacactgaggcagacgtgtcggttccattccatttccatttctgcagcttagcttgtgtcctgccctccgcccgaggcaaaacgtatcctgaggacttcttccggagagggtggggtggagcagcgggggagccttggccgaagagaaccatgcttggcaccgtctgtgtcccctcggccgctggacaccagaaagccacgtgggtccctggcgcctgcctttagcctgggggcccccacctccactctctgggttcctaggaatgtccagcctcggagaccttcacaaagccttgggagggtgatgagtgctggtcctgacaagaggccgctggggacactgtccgttttgtttcgtttctgtgatctcccggcacgtttggagctgggaagaccacactggtggcagaatcctaaaattaaaggaggcagcctcctagttgctgaaagttaaggaatgtgtaaaacctccacgtgactgtttggtgcatcttgacctgggaagacgcctcatgggaacgaacttggacaggtgttgggttgacccctcttctgcaggaagtccctgagctgagacgcaaagttggctgggtggtggtcggcaccctggctcctgcaggtccacacaccttccaggcctgtggcctgcctccaaagatgtgcaagggcaggctggctgcacggggagagggaagtattttgccgaaatatgagaactggggcctcctgctcccagggagctccagggcccctctctcctcccacctggacttggggggaactgagaaacactttcctggagctgctggcttttgcacttttttgatggcagaagtgtgacctgagagtcccaccttctcttcaggaacgtagatgtcggggtgtcttgccctggggggcttggaacctctgaaggtggggagcggaacacctggcatccttccccagcacttgcattacggtccctgctcttccaaggtggggacagtggcccaagcaaggcctcacacgcagccacttcttcaagagctgcctgcacactgtcttggagcatctgccttgtgcctggcactctgccggtgccttgggaaggtcggtaagagtggactttgtcctgggcttcccttcatggcgtctagacacttttgtggtgatggaaagcatgggacctgtcgtctcagcctgttggtttctcctcattgcctcaaaccctggggtaggtggaacggggggtctcgtgcccagatgaaaccatttggaaactcggcagcagagtttgtccaaatgacccttttcaggatgtctcaaagcttgtgccaaaggtcacttttctttcctgccttctgctgtgagccctgagatcctcctcccagctcaagggacaggtcctgggtgagggtgggagatttagacacctgaaactgggcgtggagagaagagccgttgctgtttgttttttgggaagagcttttaaagaatgcatatttttttacctggttggaattgagtaggaactgaggctgtgcttcaggtatggtacaatcaagtgggggattttcatgctgaacccattcaaagccctccccgtccccgcatttccaggccaccctttggctggcgtctgctggagaggatgtctctgtcgcattcccgtgcagctcagctcgcgcaggttttctctctctccctggatgttgagctctcatcagaatatgtgggtggggggtggacgtgcacgggtgcatgattgtgcttaacttggttgtatttttcgatttgacatggaagcctgttgctttgctctagagaatagtttctcgtgtccccttcgcacgcctcattctttgaacctcatctctgatgtttgatacagatgggggcttgatagctgtggtcccctttcccttctgactacgtgaaaatcaatacctaaatacagaagccttggtctaaacaccgagacttttagtttgcgaaggggcttagatagggagagaggtaacatgaatctggacaggggagggagatactatagaaaggagaacactgcatactttgcaaagccagtgacctccttttgaaggggacattggacgggggccgggggcgggggttcggtttgactaccgtcatgaacttttggcgtatactgattcctccaactctccaccccacaaaataacggggaccaatatttttaactttgcctatttgtttttgggtgagtttcccccctccattattctgtcctgagaccacgggcaaagctcttccattttgagagagaagaaaaactgtttggaaccacaccaatgatatttttctttgtaatacttgaaatttatttttttattattttgatagcagatgtgctatttatttatttaatatatgtataaggagtcctaaacaatagaaagctgtagaagctgtagagataggcttcagttgttaattggtttggagcctcctatgtgtgacttatgactctctgtgttctgtgtatttgtctgaattaatgacctgggatataaagctatgctagctttcaaacaggagatgccttcagaaagctttgtatattttgcagttgccagaccaataaaatacctggttgaaatacatggacgaaaaaaaaaaaaaaaaaaaaaaa

SEQ ID NO: 213 - protein, 520 aa, Homo sapien
MPLELTQSRVQKIWVPVDHRPSLPRSCGPKLTNSPTVIVMVGLPARGKTYISKKLTRYLNWIGVPTKVFNVGEYRREAVKQYSSYNFFRPDNEEAMKVRKQCALAALRDVKSYLAKEGGQIAVFDATNTTRERRHMILHFAKENDFKAFFIESVCDDPTVVASNIMEVKISSPDYKDCNSAEAMDDFMKRISCYEASYQPLDPDKCDRDLSLIKVIDVGRRFLVNRVQDHIQSRIVYYLMNIHVQPRTIYLCRHGENEHNLQGRIGGDSGLSSRGKKFASALSKFVEEQNLKDLRVWTSQLKSTIQTAEALRLPYEQWKALNEIDAGVCEELTYEEIRDTYPEEYALREQDKYYYRYPTGESYQDLVQRLEPVIMELERQENVLVICHQAVLRCLLAYFLDKSAEEMPYLKCPLHTVLKLTPVAYGCRVESIYLNVESVCTHRERSEDAKKGPNPLMRRNSVTPLASPEPTKKPRINSFEEHVASTSAALPSCLPPEVPTQLPGQNMKGSRSSADSSRKH

SEQ ID NO: 214 - DNA, 2446 bp, Homo sapien
gcgccgcggcgcggagtcccggctgcgggatagaccgagggccatggccgcctctcccggacccgccggcgttggcggcgccggagcagtctacggctccggctcttcgggcttcgccctcgactcgggactggagatcaaaactcgctcggtggagcagacgctactcccgctggtttctcagatcaccacgcttattaatcataaagataataccaaaaagtctgataaaactctgcaagcaattcagcgtgtaggacaagctgtcaacttggcagttggaagatttgttaaagtaggagaagctatagccaatgaaaactgggatttgaaagaagaaataaatattgcttgtattgaagctaaacaagcaggagaaacaattgcagcacttacagacataaccaacttgaaccatctggaatctgatgggcagatcacaatttttacagacaaaacaggagtgataaaggctgcaagattacttctttcttcagtgacaaaagtgttgttgctggcagaccgagtagtcattaaacagataataacatcaagaaataaggttctcgcaactatggaaagactagagaaagtgaatagctttcaagagtttgtccaaatattcagtcaatttggaaatgaaatggtggagtttgcacatctgagtggagatagacaaaatgatttgaaagatgaaaagaaaaaggcaaaaatggcagcagctagggcagttcttgaaaagtgtacaatgatgcttctcacagcttcaaagacatgtctgaggcatcctaactgcgaatcagcccataaaaacaaagaaggagtatttgaccgtatgaaagtggcattggataaggtcattgaaattgtgactgactgtaaaccgaatggagagactgacatttcatctatcagtatttttactggaattaaggaattcaagatgaatattgaagctcttcgggagaatctttattttcagtccaaagagaacctttctgtgacattggaagtcatcttggagcgtatggaggactttactgattctgcctacaccagccatgagcacagagaacgcatcttggaactgtcaactcaggcgagaatggaactgcagcagttaatttctgtgtggattcaagctcaaagcaagaaaacaaaaagcatcgctgaagaactggaactcagtattttgaaaatcagtcacagtcttaatgaacttaagaaagaacttcatagtacagcgacacagctggcagcagatctattaaaataccatgctgatcatgtggttctaaaagcattaaaacttactggagtagaaggaaatttagaagctttggctgaatatgcctgtaaactctctgaacagaaagagcagcttgttgagacctgtcgattgttacgacacatatctgggacagaacctctggaaataacctgtatacatgcagaggagacatttcaggtgactggccaacagataatttctgctgctgaaacattgacattgcatccatctagtaaaattgctaaagaaaacctagatgtattttgtgaagcttgggaatcccaaattagtgacatgtcaacactgctgagagaaatcaatgacgtgtttgaaggaagacgaggagagaagtatggctacctttcacttccaaagccaatgaagaataatgcaaacctgaaatcattaaagccagacaagcctgactctgaggagcaagccaagatagcaaagcttggacttaagctgggtttgctcacctctgacgctgactgcgaaattgagaagtgggaagatcaggagaatgagattgttcaatatggacggaacatgtccagtatggcctattctctgtatttatttactagaggagaggggccactgaaaacttcccaggatttaattcatcaactagaggtttttgctgcagagggtttaaagcttacttccagtgttcaagctttttcaaaacagctgaaagacgatgacaagcttatgcttctcctggaaataaacaagctaattcctctatgccaccagctccagacagtaactaagacttctttgcagaataaagtatttctaaaggttgacaagtgtattacgaagacaagatccatgatggctctcttagtccaacttctttcactttgttataaactgctgaagaagcttcagatggaaaataacggatgggtctcagttacaaataaggacactatggatagtaaaacttgagaagcttttggggtcagatctctggaacatcatgtgatgaagctgacatttttaaaaatcaaatgatcctttatcttttcagaaattcatcaattttataaagaaaacaatattgaaattttgctctattttctgatcatgaaactgattgtaaagctttttgacaactaataaatgtcttggtaattgctagattct

SEQ ID NO: 215 - protein, 734 aa, Homo sapien
MAASPGPAGVGGAGAVYGSGSSGFALDSGLEIKTRSVEQTLLPLVSQITTLINHKDNTKKSDKTLQAIQRVGQAVNLAVGRFVKVGEAIANENWDLKEEINIACIEAKQAGETIAALTDITNLNHLESDGQITIFTDKTGVIKAARLLLSSVTKVLLLADRVVIKQIITSRNKVLATMERLEKVNSFQEFVQIFSQFGNEMVEFAHLSGDRQNDLKDEKKKAKMAAARAVLEKCTMMLLTASKTCLRHPNCESAHKNKEGVFDRMKVALDKVIEIVTDCKPNGETDISSISIFTGIKEFKMNIEALRENLYFQSKENLSVTLEVILERMEDFTDSAYTSHEHRERILELSTQARMELQQLISVWIQAQSKKTKSIAEELELSILKISHSLNELKKELHSTATQLAADLLKYHADHVVLKALKLTGVEGNLEALAEYACKLSEQKEQLVETCRLLRHISGTEPLEITCIHAEETFQVTGQQIISAAETLTLHPSSKIAKENLDVFCEAWESQISDMSTLLREINDVFEGRRGEKYGYLSLPKPMKNNANLKSLKPDKPDSEEQAKIAKLGLKLGLLTSDADCEIEKWEDQENEIVQYGRNMSSMAYSLYLFTRGEGPLKTSQDLIHQLEVFAAEGLKLTSSVQAFSKQLKDDDKLMLLLEINKLIPLCHQLQTVTKTSLQNKVFLKVDKCITKTRSMMALLVQLLSLCYKLLKKLQMENNGWVSVTNKDTMDSKT

SEQ ID NO: 216 - DNA, 884 bp, Homo sapien
cgaggttcgggtcgtggggcggagggaagagcgggcgggcgggaggcgccggcgccagacgcggagggaaggagctacgagtagccgccgagaggccgcggagccagcgacgaccgacccagccgagccgccgccgccgccgcgcccccatggcggccgccaaggacactcatgaggaccatgatacttccactgagaatacagacgagtccaaccatgaccctcagtttgagccaatagtttctcttcctgagcaagaaattaaaacactggaagaagatgaagaggaactttttaaaatgcgggcaaaactgttccgatttgcctctgagaacgatctcccagaatggaaggagcgaggcactggtgacgtcaagctcctgaagcacaaggagaaaggggccatccgcctcctcatgcggagggacaagaccctgaagatctgtgccaaccactacatcacgccgatgatggagctgaagcccaacgcaggtagcgaccgtgcctgggtctggaacacccacgctgacttcgccgacgagtgccccaagccagagctgctggccatccgcttcctgaatgctgagaatgcacagaaattcaaaacaaagtttgaagaatgcaggaaagagatcgaagagagagaaaagaaagcaggatcaggcaaaaatgatcatgccgaaaaagtggcggaaaagctagaagctctctcggtgaaggaggagaccaaggaggatgctgaggagaagcaataaatcgtcttattttattttcttttcctctctttcctttcctttttttaaaaaattttaccctgcccctctttttcggtttgtttttattctttcatttttacaagggacgttatataaagaactgaactc

SEQ ID NO: 217 - protein, 201 aa, Homo sapien
MAAAKDTHEDHDTSTENTDESNHDPQFEPIVSLPEQEIKTLEEDEEELFKMRAKLFRFASENDLPEWKERGTGDVKLLKHKEKGAIRLLMRRDKTLKICANHYITPMMELKPNAGSDRAWVWNTHADFADECPKPELLAIRFLNAENAQKFKTKFEECRKEIEEREKKAGSGKNDHAEKVAEKLEALSVKEETKEDAEEKQ

SEQ ID NO: 218 - DNA, 3915 bp, Homo sapien
gtggggtggggtggggctgggggcttgtcgccctttcaggctccaccctttgcggagattataaatagtcatgatcccagcgagacccagagatgcctgtaatggtgagactttggatccttcctgaggacgtggagaaaactttctgctgagaaggacattttgaaggttttgttggctgaaaaagctgtttctggaatcacccctagatctttcttgaagacttgaattagattacagcgatggggacacagaaggtcaccccagctctgatatttgccatcacagttgctacaatcggctctttccaatttggctacaacactggggtcatcaatgctcctgagaagatcataaaggaatttatcaataaaactttgacggacaagggaaatgccccaccctctgaggtgctgctcacgtctctctggtccttgtctgtggccatattttccgtcgggggtatgatcggctccttttccgtcggactcttcgtcaaccgctttggcaggcgcaattcaatgctgattgtcaacctgttggctgtcactggtggctgctttatgggactgtgtaaagtagctaagtcggttgaaatgctgatcctgggtcgcttggttattggcctcttctgcggactctgcacaggttttgtgcccatgtacattggagagatctcgcctactgccctgcggggtgcctttggcactctcaaccagctgggcatcgttgttggaattctggtggcccagatctttggtctggaattcatccttgggtctgaagagctatggccgctgctactgggttttaccatccttcctgctatcctacaaagtgcagcccttccattttgccctgaaagtcccagatttttgctcattaacagaaaagaagaggagaatgctaagcagatcctccagcggttgtggggcacccaggatgtatcccaagacatccaggagatgaaagatgagagtgcaaggatgtcacaagaaaagcaagtcaccgtgctagagctctttagagtgtccagctaccgacagcccatcatcatttccattgtgctccagctctctcagcagctctctgggatcaatgctgtgttctattactcaacaggaatcttcaaggatgcaggtgttcaagagcccatctatgccaccatcggcgcgggtgtggttaatactatcttcactgtagtttctctatttctggtggaaagggcaggaagaaggactctgcatatgataggccttggagggatggctttttgttccacgctcatgactgtttctttgttattaaaggataactataatgggatgagctttgtctgtattggggctatcttggtctttgtagccttctttgaaattggaccaggccccattccctggtttattgtggccgaactcttcagccagggcccccgcccagctgcgatggcagtggccggctgctccaactggacctccaacttcctagtcggattgctcttcccctccgctgctcactatttaggagcctacgtttttattatcttcaccggcttcctcattaccttcttggcttttaccttcttcaaagtccctgagacccgtggcaggacttttgaggatatcacacgggcctttgaagggcaggcacacggtgcagatagatctggaaaggacggcgtcatggagatgaacagcatcgagcctgctaaggagaccaccaccaatgtctaagtcgtgcctccttccacctccctcccggcatgggaaagccacctctccctcaacaagggagagacctcatcaggatgaacccaggacgcttctgaatgctgctacttaattcctttctcatcccacgcactccatgagcaccccaaggctgcggtttgttggatcttcaatggctttttaaattttatttcctggacatcctcttctgcttaggagagaccgagtgaacctaccttcatttcaggagggattggccgcttggcacatgacaactttgccagcttttcctcccttgggttctgatattgccgcactaggggatataggagaggaaaagtaaggtgcagttcccccaacctcagacttaccaggaagcagatacatatgagtgtggaagccggagggtgtttatgtaagagcaccttcctcacttccatacagctctacgtggcaaattaacttgagttttatttattttatcctctggtttaattacataatttttttttttttactttaagtttcaggatacatgtgccgaatgtgcaggtttgttacataggtatatatatgccatgatggaaatatttatttttttaagcgtaattttgccaaataataaaaacagaaggaaattgagattagagggaggtgtttaaagagaggttatagagtagaagatttgatgctggagaggttaaggtgcaataagaatttagggagaaatgttgttcattattggagggtaaatgatgtggtgcctgaggtctgtacgttacctcttaacaatttctgtccttcagatggaaactctttaacttctcgtaaaagtcatatacctatataataaagctactgatttccttggagcttttttctttaagataatagtttacatgtagtagtacttgaaatctaggattattaactaatatgggcattgtagttaatgatggttgatgggttctaattttggatggagtccagggaagagaaagtgatttctagaaagcctgttcccctcactggatgaaataactccttcttgtagtagtctcattacttttgaagtaatcccgccacctatctcgtgggagagccatccaaataagaaacctaaaataattggttcttggtagagattcattatttttccactttgttctttaggagattttaggtgttgattttctgttgtattttaactcatacctttaaaggaattccccaaagaatgtttatagcaaacttggaatttgtaacctcagctctgggagaggatttttttctgagcgattattatctaaagtgtgttgttgctttaggctcacggcacgcttgcgtatgtctgttaccatgtcactgtggtcctatgccgaatgccctcaggggacttgaatctttccaataaaccaggtttagacagtatgagtcaatgtgcagtgtagcccacacttgagaggatgaatgtatgtgcactgtcactttgctctgggtggaagtacgttattgttgacttattttctctgtgtttgttcctacagcccctttttcatatgttgctcagtctccctttcccttcttggtgcttacacatctcagaccctttagccaaacccttgtcagtgacagtattttggttcttagttctcactgttccctctgctcctggagcctttgaataaaaatgcacgtagctgaggccggatgcggtggctcacgcctgtaatcccagcactttgggaggcctaggcgggcggtcaggggttcgagaccagtctggccaacatcgtgaaaccctgtctctactaaaaatgcaaaaattagccgggcgtggtggcgggcgcctgtaatcccagctacttgggaagctgaggcgggagaatcatgtgaacccgggacgcaggggttgcagtgagcggagatcgcatcattgcactctagcctgggccacagggcgagactccgtctcaaaaaaaaaaaaatgcacatagctatcgagtgtgctttagcttgaaaaggtgaccttgcaacttcatgtcaactttctggctcctcaaacagtaggttggcagtaaggcagggtcccatttctcactgagaagattgtgaatatttccatatggattttctattgttactctggttctttgttttaaaataaaaattctgaatgtacacg

SEQ ID NO: 219 - protein, 496 aa, Homo sapien
MGTQKVTPALIFAITVATIGSFQFGYNTGVINAPEKIIKEFINKTLTDKGNAPPSEVLLTSLWSLSVAIFSVGGMIGSFSVGLFVNRFGRRNSMLIVNLLAVTGGCFMGLCKVAKSVEMLILGRLVIGLFCGLCTGFVPMYIGEISPTALRGAFGTLNQLGIVVGILVAQIFGLEFILGSEELWPLLLGFTILPAILQSAALPFCPESPRFLLINRKEEENAKQILQRLWGTQDVSQDIQEMKDESARMSQEKQVTVLELFRVSSYRQPIIISIVLQLSQQLSGINAVFYYSTGIFKDAGVQEPIYATIGAGVVNTIFTVVSLFLVERAGRRTLHMIGLGGMAFCSTLMTVSLLLKDNYNGMSFVCIGAILVFVAFFEIGPGPIPWFIVAELFSQGPRPAAMAVAGCSNWTSNFLVGLLFPSAAHYLGAYVFIIFTGFLITFLAFTFFKVPETRGRTFEDITRAFEGQAHGADRSGKDGVMEMNSIEPAKETTTNV

SEQ ID NO: 220 - DNA, 3915 bp, Homo sapien; identical to SEQ ID NO: 218

SEQ ID NO: 221 - protein, 496 aa, Homo sapien; identical to SEQ ID NO: 219

SEQ ID NO: 222 - DNA, 836 bp, Homo sapien
gtgaaacaccctcggctgggaagtcagttcgttctctcctctcctctcttcttgtttgaacatggtgcggactaaagcagacagtgttccaggcacttacagaaaagtggtggctgctcgagcccccagaaaggtgcttggttcttccacctctgccactaattcgacatcagtttcatcgaggaaagctgaaaataaatatgcaggagggaaccccgtttgcgtgcgcccaactcccaagtggcaaaaaggaattggagaattctttaggttgtcccctaaagattctgaaaaagagaatcagattcctgaagaggcaggaagcagtggcttaggaaaagcaaagagaaaagcatgtcctttgcaacctgatcacacaaatgatgaaaaagaatagaactttctcattcatctttgaataacgtctccttgtttaccctggtattctagaatgtaaatttacataaatgtgtttgttccaattagctttgttgaacaggcatttaattaaaaaatttaggtttaaatttagatgttcaaaagtagttgtgaaatttgagaatttgtaagactaattatggtaacttagcttagtattcaatataatgcattgtttggtttcttttaccaaattaagtgtctagttcttgctaaaatcaagtcattgcattgtgttctaattacaagtatgttgtatttgagatttgcttagattgttgtactgctgccatttttattggtgtttgattattggaatggtgccatattgtcactccttctacttgctttaaaaagcagagttagatttttgcacattaaaaaattcagtattaatt

SEQ ID NO: 223 - protein, 111 aa, Homo sapien
MVRTKADSVPGTYRKVVAARAPRKVLGSSTSATNSTSVSSRKAENKYAGGNPVCVRPTPKWQKGIGEFFRLSPKDSEKENQIPEEAGSSGLGKAKRKACPLQPDHTNDEKE

SEQ ID NO: 224 - DNA, 5316 bp, Homo sapien
cggacgcgtgggaacgaagccacccattacggtatgatgatgtcaaacgtgatgctgatgctacagttacagcccctgctggcgcagcctctctgattctctctccctctccgcgtccagtgctgggctttttcagacaagtgcatctcctaaccaggtcacatttcagccgcgacccactctccgccagtcaccggaggcagaccgcgggaggagagctgaggacagccgcgtgcgcttcgccagcagcggggtgggaggaaggacattaaaatactgcagaagtcaagaccccccaggtcgaacccagaccacgatgcgcgccccgggctgcgggcggctggtgctgccgctgctgctcctggccgcggcagccctggccgaaggcgacgccaaggggctcaaggagggcgagacccccggcaatttcatggaggacgagcaatggctgtcgtccatctcgcagtacagcggcaagatcaagcactggaaccgcttccgagacgaagtggaggatgactatatcaagagctgggaggacaatcagcaaggagatgaagccctggataccaccaaggacccctgccagaaggtgaagtgcagccgccacaaggtgtgcattgcccagggctaccagcgggccatgtgcatcagtcgcaagaagctggagcacaggatcaagcagccgaccgtgaaactccatggaaacaaagactccatctgcaagccctgccacatggcccagcttgcctctgtctgcggctcagatggccacacttacagctctgtgtgtaagctggagcaacaggcgtgcctgagcagcaagcagctggcggtgcgatgcgagggcccctgcccctgccccacggagcaggctgccacctccaccgccgatggcaaaccagagacttgcaccggtcaggacctggctgacctgggagatcggctgcgggactggttccagctccttcatgagaactccaagcagaatggctcagccagcagtgtagccggcccggccagcgggctggacaagagcctgggggccagctgcaaggactccattggctggatgttctccaagctggacaccagtgctgacctcttcctggaccagacggagctggccgccatcaacctggacaagtacgaggtctgcatccgtcccttcttcaactcctgtgacacctacaaggatggccgggtctctactgctgagtggtgcttctgcttctggagggagaagcccccctgcctggcagagctggagcgcatccagatccaggaggccgccaagaagaagccaggcatcttcatcccgagctgcgacgaggatggctactaccggaagatgcagtgtgaccagagcagcggtgactgctggtgtgtggaccagctgggcctggagctgactggcacgcgcacgcatgggagccccgactgcgatgacatcgtgggcttctcgggggactttggaagcggtgtcggctgggaggatgaggaggagaaggagacggaggaagcaggcgaggaggccgaggaggaggagggcgaggcaggcgaggctgacgacgggggctacatctggtagacgccctcagaagccggctgccgggggggactcaacagcagagctctgagcagcagcaggcaacttcgagaacggatccagaaatgcagtcagaaggaccctgctccacctggggggactgggagtgtgagtgtgcatggcatgtgtgtggcacagatggctgggacgggtgacagtgtgagtgcatgtgtgcatgcatgtgtgtatgtgtgtgtgtgtgtggcatgcgctgacaaatgtgtccttgatccacactgctcctggcagagtgagtaacccaaaggccccttcggcctccttgtagctgttttctttccttttgttgttggttttaaaatacattcacacacaaatacaaattgacaggtcaaaatccatgaaatgagatcccccagccgtgtcctccagcccagccctgaccccttggtttctaccctggctccccttggtttctaccctggctcaaccgacccctgtctgcccttctccctcctgcttctgaggtcaagctctggcctgcgagcctgtccccattgcaaaggggagggaggggcagggagctgtctaccagctgaggtcctcccaaaactgggccgatgtggtgtgacatccccaccagcctcagatgagacgggccaggacgcccagccacagcaagccctgtccctttgccggatccccaaacactagagaagctctcctaacccaaggcggagaatgaaggtggtggcggcagaggaggagggcagcagctgagaggccagggacagggtgcctcgccaagctgtctgaggtctgtcccaggtggcccaggtggtgcaggtagaacagggtgaggagagggggtcggctcaacaggaggaggctgtggctgcagagcctggaggagcttttaggtgttgagatggggcagctctgaatcctagaccctggaatagcctgtcccttttctctgggtctcgtggtggagccatgatctgggctgctctcttggggacactgggtggtggttacacagttgacctctgcctggctcccccttggtgcaactcctgcctccatcccccttgctggggtcccctcatccacttgagggcgcctgagggccaggagcagcaggcaaggagcctgggtctaggctaagggggtgtgtgcccacctcctccctgacccttaacactcctgtcctgcccagaccaacagagagagctgtccctgagaccccggagagaagcagctgccgaaagctgcagcctttccgcactctgagaccatgatcttcctcctgccaggggagagccacccacaggccatgtccagccccacttccctcagcccccagggcttccttctggcccctctgaggattccctagggctgccccgcagaggggcttccccaagctctgttttgaagcctgcaatgtggaaaagtgagaagtcagagggaacaggacaggtgcagccgggctctgaggccacacctcacacctcgctgttccccaacatcccctgagcagtgtgagctcatctcaccagatgagaagaggccctgtgcatttcttttgtttgtttgttgctgttttcccccacccatccagttctcctcagcaaagcaaattccttaacacctttggtggagaatttcttacccagacttggggctgtgatgcccttcagtgcgtggtgagtgcagcgtgtgtgcgtgtgcctgtgtgtgaacctgggggccatcctggtggcctgggagcgtgaggagaggccccctgtgtgctgggtgagtggtgggtgtggggtcaatgcagtgaggctctctgggtgaggctcccaacctggcagtccccagcctcccagcatctgtgagcgtctgttggactttacagaagagcctcatcccgtctgcccctcactctgccctggaatcaacatcttccgagtccttcttgggggaaatagcagagccccacttaactccataaactgcttcccattccgcagcccagttctgattgttgaggtgtcgcgtcgttccaggtcccccagtcccctctttctcctgtcctctctctgtccttcacctccccactccagccccggctcagttcagggaaatgctgttccatatcagccctctgctctctgaggcagccgcgcctctgactcggagctacttgaaacttctgctcttgctaggattggagtctacctatctcttccatttgtcccagctggagttctggaactttcctcctcggggtgggggtgggggttgttaaggatgctggggggcctggggaaggaaggagttcagaggaagggtgtcccctgtcctcttgatgtcaccctccgctcctgggacacgtgctctctctgtctctgggtcttctggctgtgcacgtttgtgtgtccttgtaaatatgttttaggaagaaagcaaaagggactgaactagcctctggtaggattgcaggggtccagccttgcctgtttccgaagcccccacactgcctttcgccccactgagactggtcccctcaaaaggtagacaaaacagcagctccctgtggagctgaagggcggcctcaaagtggctttttgttagacaaggttaaggtttcctcatgagcaaggttgcagatcggtccttcctcagctccttgatttgtgaccttgaccaaggggcctgccacccagcccctccagtgccctctcctcgatgcctcgctccttcctgcccccactcccctggcttaggcaggtaggggaattagggccatgctggaagaagcttaaccatgtgttcaaagaacggtttcttgcttgcttggtcctggaactccccttggctgccccaggcctccttggcccatgggtgctgggggaggtggatgtcagatctggtaggttgcagcagagaaaataaatgtgccttgagagaccactcagagagggtccaagggtgatggagaaggaagcatggcctgggagcttggaagggaggggtggtgggtggcggcatcttgactgccccctgttgtcccacacgtggggggtggtcaccccccttcactccagcccgcctgccttcagccttccatgagcttcacctgcttccaacttcactttggagggggtggggtccgttggcatcaacacggggaccctctgcttcaccaaagcccgagccctcagcccctggggagaacaaatggctgagctttgatacctggggtcgtcgagaggctgcgggctggcggcagtcccaggggagagacaccacagaaggagacccagacatcccgaggaagttcccagcagagcaaactgctttccagcctgaagcctgcttaaactgtgtgatgtgcaataactgagcttagagttaggaattgtgttcaagtgcttggatttccgtctgtagatttaactgctgaaattgtatctctcagtaattttagatgtcttttaaaaaattgaaaaacaaagtgttagactgtgtgcgtgtgcgttgatgggcactcaagagtcccgtgagtcatccagccctgcctttcccctgcgcccccatcctctcacgtcccgccctgcctccacttggggaccctgcctcgtgtcgtctttatctgcctattactcagcctaaggaaacaagtacactccacacatgcataaaggaaatcaaatgttatttttaagaaaatggaaaataaaaactttataaacacc

SEQ ID NO: 225 - protein, 424 aa, Homo sapien
MRAPGCGRLVLPLLLLAAAALAEGDAKGLKEGETPGNFMEDEQWLSSISQYSGKIKHWNRFRDEVEDDYIKSWEDNQQGDEALDTTKDPCQKVKCSRHKVCIAQGYQRAMCISRKKLEHRIKQPTVKLHGNKDSICKPCHMAQLASVCGSDGHTYSSVCKLEQQACLSSKQLAVRCEGPCPCPTEQAATSTADGKPETCTGQDLADLGDRLRDWFQLLHENSKQNGSASSVAGPASGLDKSLGASCKDSIGWMFSKLDTSADLFLDQTELAAINLDKYEVCIRPFFNSCDTYKDGRVSTAEWCFCFWREKPPCLAELERIQIQEAAKKKPGIFIPSCDEDGYYRKMQCDQSSGDCWCVDQLGLELTGTRTHGSPDCDDIVGFSGDFGSGVGWEDEEEKETEEAGEEAEEEEGEAGEADDGGYIW

SEQ ID NO: 226 - DNA, 4471 bp, Homo sapien
ttcggtggcctctagtgagatctggaggatccaaggattctgtagctacaatgttgtcaagactttttcgaatgcatggcctctttgtggcctcccatccctgggaagtcatagtggggacagtgacactgaccatctgcatgatgtccatgaacatgtttactggtaacaataagatctgtggttggaattatgaatgtccaaagtttgaagaggatgttttgagcagtgacattataattctgacaataacacgatgcatagccatcctgtatatttacttccagttccagaatttacgtcaacttggatcaaaatatattttgggtattgctggccttttcacaattttctcaagttttgtattcagtacagttgtcattcacttcttagacaaagaattgacaggcttgaatgaagctttgccctttttcctacttttgattgacctttccagagcaagcacattagcaaagtttgccctcagttccaactcacaggatgaagtaagggaaaatattgctcgtggaatggcaattttaggtcctacgtttaccctcgatgctcttgttgaatgtcttgtgattggagttggtaccatgtcaggggtacgtcagcttgaaattatgtgctgctttggctgcatgtcagttcttgccaactacttcgtgttcatgactttcttcccagcttgtgtgtccttggtattagagctttctcgggaaagccgcgagggtcgtccaatttggcagctcagccattttgcccgagttttagaagaagaagaaaataagccgaatcctgtaactcagagggtcaagatgattatgtctctaggcttggttcttgttcatgctcacagtcgctggatagctgatccttctcctcaaaacagtacagcagatacttctaaggtttcattaggactggatgaaaatgtgtccaagagaattgaaccaagtgtttccctctggcagttttatctctctaaaatgatcagcatggatattgaacaagttattaccctaagtttagctctccttctggctgtcaagtacatcttctttgaacaaacagagacagaatctacactctcattaaaaaaccctatcacatctcctgtagtgacacaaaagaaagtcccagacaattgttgtagacgtgaacctatgctggtcagaaataaccagaaatgtgattcagtagaggaagagacagggataaaccgagaaagaaaagttgaggttataaaacccttagtggctgaaacagataccccaaacagagctacatttgtggttggtaactcctccttactcgatacttcatcagtactggtgacacaggaacctgaaattgaacttcccagggaacctcggcctaatgaagaatgtctacagatacttgggaatgcagagaaaggtgcaaaattccttagtgatgctgagatcatccagttagtcaatgctaagcatatcccagcctacaagttggaaactctgatggaaactcatgagcgtggtgtatctattcgccgacagttactttccaagaagctttcagaaccttcttctctccagtacctaccttacagggattataattactccttggtgatgggagcttgttgtgagaatgttattggatatatgcccatccctgttggagtggcaggacccctttgcttagatgaaaaagaatttcaggttccaatggcaacaacagaaggttgtcttgtggccagcaccaatagaggctgcagagcaataggtcttggtggaggtgccagcagccgagtccttgcagatgggatgactcgtggcccagttgtgcgtcttccacgtgcttgtgactctgcagaagtgaaagcctggctcgaaacatctgaagggttcgcagtgataaaggaggcatttgacagcactagcagatttgcacgtctacagaaacttcatacaagtatagctggacgcaacctttatatccgtttccagtccaggtcaggggatgccatggggatgaacatgatttcaaagggtacagagaaagcactttcaaaacttcacgagtatttccctgaaatgcagattctagccgttagtggtaactattgtactgacaagaaacctgctgctataaattggatagagggaagaggaaaatctgttgtttgtgaagctgtcattccagccaaggttgtcagagaagtattaaagactaccacagaggctatgattgaggtcaacattaacaagaatttagtgggctctgccatggctgggagcataggaggctacaacgcccatgcagcaaacattgtcaccgccatctacattgcctgtggacaggatgcagcacagaatgttggtagttcaaactgtattactttaatggaagcaagtggtcccacaaatgaagatttatatatcagctgcaccatgccatctatagagataggaacggtgggtggtgggaccaacctactacctcagcaagcctgtttgcagatgctaggtgttcaaggagcatgcaaagataatcctggggaaaatgcccggcagcttgcccgaattgtgtgtgggaccgtaatggctggggaattgtcacttatggcagcattggcagcaggacatcttgtcaaaagtcacatgattcacaacaggtcgaagatcaatttacaagacctccaaggagcttgcaccaagaagacagcctgaatagcccgacagttctgaactggaacatgggcattgggttctaaaggactaacataaaatctgtgaattaaaaaagctcaatgcattgtcttgtggaggatgaataaatgtgatcactgagacagccacttggtttttggctctttcagagaggtctcaggttctttccatgcagactcctcagatctgaacacagtttagtgctttacatgctgtgctctttgaagagatttcaacaagaatattgtatgttaaagcatcagagatggtaatctacagctcacctctgaaagcaaatataagctgggaaaaaagttttgatgaaattcttgaagttcatggtgatcagtgcaattgaccttctccctcactcctgccagttgaaaatggatttttaaattatactgtagctgatgaaactcctgattttgtagttaatttattaagtctgggatgtagaacttcaagaagtaagagctaagttctaagttcatgtttgtaaattaatacttcatttggtgctggtctattttgattttggggggtaatcagcattattcttcagaaggggacctgttttcttcaagggaagaaacactcttattcccaaactacagaataatgtgttaaacatgctaaatagttctatcaggaaaacaaatcactgtatttatctccgcaggctatttgttcagagaggccttttgtttaaatataaatgtttaaatataaatgtttgtctggattggctataacatgtctttcagcattaggcttttaagaaacacagggttttgtattctttactaaagatatcagagctcttaatgttgcttagatgagggtgactgtcaagtacaagcaagactgggaccttagaaatcattgtagaaacacagttttgaaagatttttaccatgtctctaagccaactttaattgcttaaaagacatttttatttagttgaaaaatctagttttttttgtaaactgtaccaaatctgtatatgttgtaataaaacttatgctagtttattggaagtgttcaagaaataaaaatcaacttgtgtactgataaaatactctagcctgggccagagaagataatgttctttaatgttgtcaggaaaccctggcttgcttgccgagcctaatgaaagggaaagtcagctttcagagccagtgaaggagccacgtgaatggccctagaactgtgcctagttcctgtggccaggaggttggtgactgaaacattcacacagggctcttggatggacccacgaacgctcttagctttctcagggggtcagcagagttattgaatcttaattttttttaatgtacaagttttgtataaataataaagaactccttattttgtattacatctaatgcttaagtgttgctcttggaaagctgatgatgtctcttgtagagatgactctgaaaaacattccaggaaaccatggcagcatggagagcctcttagtgattgtgtctgcattgttattgtggaagatttaccttttctgttgtacgtaaagcttaaattacttttgttgtgactttttagccagtgactttttctgagcttttcatggaagtggcagtgaaaaatatgttgagtgttcaaaaaagtgactgtaattaatatcttgctggattaatgttttgtacaattactaaattgtatacattttgttatagaatacttttttctagtttcagtaaataatgaaaaggaagttaatacca

SEQ ID NO: 227 - protein, 888 aa, Homo sapien [sequence omitted]

SEQ ID NO: 228 - DNA, 4471 bp, Homo sapien; identical to SEQ ID NO: 226

SEQ ID NO: 229 - protein, 888 aa, Homo sapien [sequence omitted]

SEQ ID NO: 230 - DNA, 1238 bp, Homo sapien
ggcacgaggaagatatatggatacagattatatatatatatacatattttccttaatagaggaatgcttcatattattcaaaaattatatcctgatcacctttttttgttttttattgtaaagtatctctgctttatccattgctgaattcgataggatgttgaaatgctggtcaccaaaaaaggaaactgagcaaattcatttcaacaacatcaaaacttcagcttctcatagtaaaaagctgaatgttactaatatttttcatatctaaaaaaaaattcttagcaatgaaattgctgttaaaacacaaatttcaatcaaatacttttgtgtatagaaaatatgtatagtaggtagatagaaaagtataaaatgtttgttgaagtatcttattttagaatgaatggagaaatgccaaagatgaatccttcactgcattatgaaaatatttcacatgttctcttggactttatataaatctgtaatagattttagaattgaaaaattctttgtgaaggtcttctaaaagtgttccaatttatctcaaaatctccatatataggatcagcttaaaacataaagaaaaccttgaatttctcaaatgtttgagatgttcaagacagtctcttaatccgttaatgcttttggaaacaattgacaaaatagggcaggcagctcatctcatgtcctgaagttggaatttaaataattcctatttgcaaattagaatgacagtgttggaatttggaggcagtagttgagcatattctctagtatatagctacacctttaataaaatgaaggaatgtcttcaatcatattttagtgggctatttataaatagtcttgaagtcaatttagtttatttatttaaaagataatgcatcctgaaagggatcatttatgaataacaatctgaagtcttttcataaaaaaaattaataaactttagttgtacatttagccagtgttatttgaagtatgtaacttttaaaatattaagtgtcttgtatgattagaatatgtgaatgagtaacttattttgtatcaggaatgttttggtactgtgttttcactcaaaccactgacttaacagatactgctgtgtataacatgtactaaatattacagttattgtgcataacagattgttcctcttatatttgtgtgtatacaggcaattcatgttttaatgtaaataaataccattttgcagttaaaaaaaaaaaaaaaaaaaa

SEQ ID NO: 231 - DNA, 1536 bp, Homo sapien
ggggggggggggaccacttggcctgcctccgtcccgccgcgccacttggcctgcctccgtcccgccgcgccacttcgcctgcctccgtcccccgcccgccgcgccatgcctgtggccggctcggagctgccgcgccggcccttgccccccgccgcacaggagcgggacgccgagccgcgtccgccgcacggggagctgcagtacctggggcagatccaacacatcctccgctgcggcgtcaggaaggacgaccgcacgggcaccggcaccctgtcggtattcggcatgcaggcgcgctacagcctgagagatgaattccctctgctgacaaccaaacgtgtgttctggaagggtgttttggaggagttgctgtggtttatcaagggatccacaaatgctaaagagctgtcttccaagggagtgaaaatctgggatgccaatggatcccgagactttttggacagcctgggattctccaccagagaagaaggggacttgggcccagtttatggcttccagtggaggcattttggggcagaatacagagatatggaatcagattattcaggacagggagttgaccaactgcaaagagtgattgacaccatcaaaaccaaccctgacgacagaagaatcatcatgtgcgcttggaatccaagagatcttcctctgatggcgctgcctccatgccatgccctctgccagttctatgtggtgaacagtgagctgtcctgccagctgtaccagagatcgggagacatgggcctcggtgtgcctttcaacatcgccagctacgccctgctcacgtacatgattgcgcacatcacgggcctgaagccaggtgactttatacacactttgggagatgcacatatttacctgaatcacatcgagccactgaaaattcagcttcagcgagaacccagacctttcccaaagctcaggattcttcgaaaagttgagaaaattgatgacttcaaagctgaagactttcagattgaagggtacaatccgcatccaactattaaaatggaaatggctgtttagggtgctttcaaaggagcttgaaggatattgtcagtctttaggggttgggctggatgccgaggtaaaagttctttttgctctaaaagaaaaaggaactaggtcaaaaatctgtccgtgacctatcagttattaatttttaaggatgttgccactggcaaatgtaactgtgccagttctttccataataaaaggctttgagttaactcactgagggtatctgacaatgctgaggttatgaacaaagtgaggagaatgaaatgtatgtgctcttagcaaaaacatgtatgtgcatttcaatcccacgtacttataaagaaggttggtgaatttcacaagctatttttggaatatttttagaatattttaagaatttcacaagctattccctcaaatctgagggagctgagtaacaccatcgatcatgatgtagagtgtggttatgaactttatagttgttttatatgttgctataataaagaagtgttctgc

SEQ ID NO: 232 - protein, 313 aa, Homo sapien
MPVAGSELPRRPLPPAAQERDAEPRPPHGELQYLGQIQHILRCGVRKDDRTGTGTLSVFGMQARYSLRDEFPLLTTKRVFWKGVLEELLWFIKGSTNAKELSSKGVKIWDANGSRDFLDSLGFSTREEGDLGPVYGFQWRHFGAEYRDMESDYSGQGVDQLQRVIDTIKTNPDDRRIIMCAWNPRDLPLMALPPCHALCQFYVVNSELSCQLYQRSGDMGLGVPFNIASYALLTYMIAHITGLKPGDFIHTLGDAHIYLNHIEPLKIQLQREPRPFPKLRILRKVEKIDDFKAEDFQIEGYNPHPTIKMEMAV

SEQ ID NO: 233 - DNA, 2758 bp, Homo sapien
ctatccgcgcgcgtcgccggcccagtcctgtcgctgacgggaggatctgaagccggccgcaggtcaaagagtaaaatgaagtacattctggttactggtggtgttatatcaggaattggaaaaggaatcattgccagcagtgtgggcacaatactcaagtcatgtggtttacatgtaacttcaatcaaaattgacccctacattaacattgatgcaggaacattctctccttatgagcatggtgaggtttttgtgctggatgatggtggggaagtagaccttgacctgggtaactatgagcggttccttgacatccgcctcaccaaggacaataatctgaccactggaaagatataccagtatgtcattaacaaggaacggaaaggagattacttggggaaaactgtccaagttgtccctcatatcacagatgcaatccaggagtgggtgatgagacaggcgttaatacctgtagatgaagatggcctggaacctcaagtgtgtgttattgagcttggtggaaccgtgggggacatagaaagcatgccctttattgaggccttccgtcagttccaattcaaggtcaaaagagagaacttttgtaacatccacgtcagtctagttccccagccaagttcaacaggggaacagaagactaaacctacccagaatagtgttcgggaacttagaggacttgggctttccccagatctggttgtatgcaggtgctcaaatccacttgacacatcagtgaaggagaaaatatcaatgttctgccatgttgagcctgaacaagtgatctgtgtccacgatgtctcatccatctaccgagtccccttgttgttagaggagcaaggggttgtagattattttcttcgaagacttgaccttcctattgagaggcagccaagaaaaatgctgatgaaatggaaagagatggctgacagatatgatcgcttgctggagacctgctctattgcccttgtggcgaaatacaccgagttctcagactcctatgcctctgtcattaaggctctggagcattctgcactggccatcaaccacaaattggaaatcaagtacatagattctgcggacttggagcccatcacctcgcaagaagagcccgtgcgctaccacgaagcttggcagaagctctgtagtgctcatggagtgctggttccaggaggatttggtgttcgaggaacagaaggaaaaatccaagcaattgcctgggctcggaatcagaaaaagccttttttgggcgtgtgcttagggatgcagttggcagtggttgaattctcaagaaacgtgctgggatggcaagatgccaattctacagagtttgaccctacgaccagtcatcccgtggtcgtagacatgccagaacacaacccagggcagatgggcggaaccatgaggctgggcaagaggagaaccctgttccagaccaagaactcagtcatgaggaaactctatggagacgcagactacttggaagagaggcaccgccaccgatttgaggtgaatccagtctggaaaaagtgtttggaagaacaaggcttgaagtttgttggccaagatgttgaaggagagagaatggaaattgtggagttagaagatcatcccttttttgttggggttcagtaccaccctgagttcctgtccaggcctatcaagccctccccaccatactttggcctcctcctggcctctgtggggcggctctcacattacctccagaaaggctgcaggctctcacccagggacacctatagtgacaggagtggaagcagctcccctgactctgaaatcaccgaactgaagtttccatcaataaatcatgactgatcttgtagcggatgattcttcaagagacccttcaaacttgggtagagtttacagctctgactttacactcggctttggagactttctttaaattatgtttttattaagattattttattatgcggaaaggtatttgggaaacttgtcacttgcatgtcccatcacgtgtactggctcctctgtggtgtctgcctgttgcgtgacactctccttgcagttcttgagttgcggcagaacatcgcgatgggaaccgatggtgggtggggctgcagatgtccccatcggtcaccttgtttctcaactacctcgcatcattgcagatcgtagcgcgttgcctgtcgctttcccttggatacctagaccgttataaagtgtgccacatggacttaccgagcatggagagaggattttagctaggatttgaacacttggtgctgggaacctcagggtattgcttgccactaagccatgaaaccagagacaaaatctctatactgccctgagttggggggaattctcagtgccaactgtggctggtcctcattcaaagggacggtcagtttggtgtcaacatgaaacaccaagatgtctgtctctgaagcgtgattttaaaatccccatgcctgtgcgtgcgcttcctatttctagggctgggaaacactccttgcatcaaggggtcacttacagaacaaagaatcttttgggggaaacttcctctaaaaccctctcatatatagacagctttgactggagggtccatttttcttccaggatggtgttactgcagttgaagggcaatatgaagttactttcttaatgtgacctagcaataggcatagctacgtggcactatattctggccagactcgatgtgtactctaacttaagaaataaatcagtaaggcag

SEQ ID NO: 234 - protein, 591 aa, Homo sapien
MKYILVTGGVISGIGKGIIASSVGTILKSCGLHVTSIKIDPYINIDAGTFSPYEHGEVFVLDDGGEVDLDLGNYERFLDIRLTKDNNLTTGKIYQYVINKERKGDYLGKTVQVVPHITDAIQEWVMRQALIPVDEDGLEPQVCVIELGGTVGDIESMPFIEAFRQFQFKVKRENFCNIHVSLVPQPSSTGEQKTKPTQNSVRELRGLGLSPDLVVCRCSNPLDTSVKEKISMFCHVEPEQVICVHDVSSIYRVPLLLEEQGVVDYFLRRLDLPIERQPRKMLMKWKEMADRYDRLLETCSIALVAKYTEFSDSYASVIKALEHSALAINHKLEIKYIDSADLEPITSQEEPVRYHEAWQKLCSAHGVLVPGGFGVRGTEGKIQAIAWARNQKKPFLGVCLGMQLAVVEFSRNVLGWQDANSTEFDPTTSHPVVVDMPEHNPGQMGGTMRLGKRRTLFQTKNSVMRKLYGDADYLEERHRHRFEVNPVWKKCLEEQGLKFVGQDVEGERMEIVELEDHPFFVGVQYHPEFLSRPIKPSPPYFGLLLASVGRLSHYLQKGCRLSPRDTYSDRSGSSSPDSEITELKFPSINHD

SEQ ID NO: 235 - DNA, 2986 bp, Homo sapien
gcgccccagtcgacgctgagctcctctgctactcagagttgcaacctcagcctcgctatggctcccagcagcccccggcccgcgctgcccgcactcctggtcctgctcggggctctgttcccaggacctggcaatgcccagacatctgtgtccccctcaaaagtcatcctgccccggggaggctccgtgctggtgacatgcagcacctcctgtgaccagcccaagttgttgggcatagagaccccgttgcctaaaaaggagttgctcctgcctgggaacaaccggaaggtgtatgaactgagcaatgtgcaagaagatagccaaccaatgtgctattcaaactgccctgatgggcagtcaacagctaaaaccttcctcaccgtgtactggactccagaacgggtggaactggcacccctcccctcttggcagccagtgggcaagaaccttaccctacgctgccaggtggagggtggggcaccccgggccaacctcaccgtggtgctgctccgtggggagaaggagctgaaacgggagccagctgtgggggagcccgctgaggtcacgaccacggtgctggtgaggagagatcaccatggagccaatttctcgtgccgcactgaactggacctgcggccccaagggctggagctgtttgagaacacctcggccccctaccagctccagacctttgtcctgccagcgactcccccacaacttgtcagcccccgggtcctagaggtggacacgcaggggaccgtggtctgttccctggacgggctgttcccagtctcggaggcccaggtccacctggcactgggggaccagaggttgaaccccacagtcacctatggcaacgactccttctcggccaaggcctcagtcagtgtgaccgcagaggacgagggcacccagcggctgacgtgtgcagtaatactggggaaccagagccaggagacactgcagacagtgaccatctacagctttccggcgcccaacgtgattctgacgaagccagaggtctcagaagggaccgaggtgacagtgaagtgtgaggcccaccctagagccaaggtgacgctgaatggggttccagcccagccactgggcccgagggcccagctcctgctgaaggccaccccagaggacaacgggcgcagcttctcctgctctgcaaccctggaggtggccggccagcttatacacaagaaccagacccgggagcttcgtgtcctgtatggcccccgactggacgagagggattgtccgggaaactggacgtggccagaaaattcccagcagactccaatgtgccaggcttgggggaacccattgcccgagctcaagtgtctaaaggatggcactttcccactgcccatcggggaatcagtgactgtcactcgagatcttgagggcacctacctctgtcgggccaggagcactcaaggggaggtcacccgcgaggtgaccgtgaatgtgctctccccccggtatgagattgtcatcatcactgtggtagcagccgcagtcataatgggcactgcaggcctcagcacgtacctctataaccgccagcggaagatcaagaaatacagactacaacaggcccaaaaagggacccccatgaaaccgaacacacaagccacgcctccctgaacctatcccgggacagggcctcttcctcggccttcccatattggtggcagtggtgccacactgaacagagtggaagacatatgccatgcagctacacctaccggccctgggacgccggaggacagggcattgtcctcagtcagatacaacagcatttggggccatggtacctgcacacctaaaacactaggccacgcatctgatctgtagtcacatgactaagccaagaggaaggagcaagactcaagacatgattgatggatgttaaagtctagcctgatgagaggggaagtggtgggggagacatagccccaccatgaggacatacaactgggaaatactgaaacttgctgcctattgggtatgctgaggcccacagacttacagaagaagtggccctccatagacatgtgtagcatcaaaacacaaaggcccacacttcctgacggatgccagcttgggcactgctgtctactgaccccaacccttgatgatatgtatttattcatttgttattttaccagctatttattgagtgtcttttatgtaggctaaatgaacataggtctctggcctcacggagctcccagtccatgtcacattcaaggtcaccaggtacagttgtacaggttgtacactgcaggagagtgcctggcaaaaagatcaaatggggctgggacttctcattggccaacctgcctttccccagaaggagtgatttttctatcggcacaaaagcactatatggactggtaatggttcacaggttcagagattacccagtgaggccttattcctcccttccccccaaaactgacacctttgttagccacctccccacccacatacatttctgccagtgttcacaatgacactcagcggtcatgtctggacatgagtgcccagggaatatgcccaagctatgccttgtcctcttgtcctgtttgcatttcactgggagcttgcactattgcagctccagtttcctgcagtgatcagggtcctgcaagcagtggggaagggggccaaggtattggaggactccctcccagctttggaagggtcatccgcgtgtgtgtgtgtgtgtatgtgtagacaagctctcgctctgtcacccaggctggagtgcagtggtgcaatcatggttcactgcagtcttgaccttttgggctcaagtgatcctcccacctcagcctcctgagtagctgggaccataggctcacaacaccacacctggcaaatttgattttttttttttttttcagagacggggtctcgcaacattgcccagacttcctttgtgttagttaataaagctttctcaactgcc

SEQ ID NO: 236 - protein, 532 aa, Homo sapien
MAPSSPRPALPALLVLLGALFPGPGNAQTSVSPSKVILPRGGSVLVTCSTSCDQPKLLGIETPLPKKELLLPGNNRKVYELSNVQEDSQPMCYSNCPDGQSTAKTFLTVYWTPERVELAPLPSWQPVGKNLTLRCQVEGGAPRANLTVVLLRGEKELKREPAVGEPAEVTTTVLVRRDHHGANFSCRTELDLRPQGLELFENTSAPYQLQTFVLPATPPQLVSPRVLEVDTQGTVVCSLDGLFPVSEAQVHLALGDQRLNPTVTYGNDSFSAKASVSVTAEDEGTQRLTCAVILGNQSQETLQTVTIYSFPAPNVILTKPEVSEGTEVTVKCEAHPRAKVTLNGVPAQPLGPRAQLLLKATPEDNGRSFSCSATLEVAGQLIHKNQTRELRVLYGPRLDERDCPGNWTWPENSQQTPMCQAWGNPLPELKCLKDGTFPLPIGESVTVTRDLEGTYLCRARSTQGEVTREVTVNVLSPRYEIVIITVVAAAVIMGTAGLSTYLYNRQRKIKKYRLQQAQKGTPMKPNTQATPP

SEQ ID NO: 237 - DNA, 2986 bp, Homo sapien; identical to SEQ ID NO: 235

SEQ ID NO: 238 - protein, 532 aa, Homo sapien; identical to SEQ ID NO: 236

SEQ ID NO: 239 - DNA, 1103 bp, Homo sapien
cttcggtcctgctgtagtgccttctgcgccaggcccggttcaatcagcggccacaactgtctagggctcagacaccaccagccaatgagggagggcacgtggagccgcgtctgggctcgcggctcctgaccaatggggaagtggcatgtgggagggcgccggggttccccccgccaatggggagctacggcgcgcggccgggacttggaggcggtgcggcgcggcgggtgcggttcagtcggtcggcggcggcagcggaggaggaggaggaggaggaggatgaggaggatgaggaggatgtgggccacgcaggggctggcggtgcgcgtggctctgagcgtgctgccgggcagccgggcgctgcggccgggcgactgcgaagtttgtatttcttatctgggaagattttaccaggacctcaaagacagagatgtcacattctcaccagccactattgaaaacgaacttataaagttctgccgggaagcaagaggcaaagagaatcggttgtgctactatatcggggccacagatgatgcagccaccaaaatcatcaatgaggtatcaaagcctctggcccaccacatccctgtggagaagatctgtgagaagcttaagaagaaggacagccagatatgtgagcttaagtatgacaagcagatcgacctgagcacagtggacctgaagaagctccgagttaaagagctgaagaagattctggatgactggggggagacatgcaaaggctgtgcagaaaagtctgactacatccggaagataaatgaactgatgcctaaatatgcccccaaggcagccagtgcaccgaccgatttgtagtctgctcaatctctgttgcacctgagggggaaaaaacagttcaactgcttactcccaaaacagcctttttgtaatttattttttaagtgggctcctgacaatactgtatcagatgtgaagcctggagctttcctgatgatgctggccctacagtacccccatgaggggattcccttccttctgttgctggtgtactctaggacttcaaagtgtgtctgggatttttttattaaagaaaaaaaatttctagctgtcaaaaaaaaaaa

SEQ ID NO: 240 - protein, 234 aa, Homo sapien
MGKWHVGGRRGSPRQWGATARGRDLEAVRRGGCGSVGRRRQRRRRRRRRMRRMRRMWATQGLAVRVALSVLPGSRALRPGDCEVCISYLGRFYQDLKDRDVTFSPATIENELIKFCREARGKENRLCYYIGATDDAATKIINEVSKPLAHHIPVEKICEKLKKKDSQICELKYDKQIDLSTVDLKKLRVKELKKILDDWGETCKGCAEKSDYIRKINELMPKYAPKAASAPTDL

SEQ ID NO: 241 - DNA, 1331 bp, Homo sapien
cggagccgcccgctgaggtcagaaggaggcgtctgcgctgatcgggtccgccgcgcgccagagccagagtcgcagccgaggggagccggggccggagcccgagcccgagccgagccggagcccgagcgagcggcggagaccgtgcccccgcctcggccccgcgccgccgcggccaggcccggcatggaggaggagtgccgggtgctctccatacagagccacgtcatccgcggctacgtgggcaaccgggcggccacgttcccgctgcaggttttgggatttgagattgacgcggtgaactctgtccagttttcaaaccacacaggctatgcccactggaagggccaagtgctgaattcagatgagctccaggagttgtacgaaggcctgaggctgaacaacatgaataaatatgactacgtgctcacaggttatacgagggacaagtcgttcctggccatggtggtggacattgtgcaggagctgaagcagcagaaccccaggctggtgtacgtgtgtgatccagtcttgggtgacaagtgggacggcgaaggctcgatgtacgtcccggaggacctccttcccgtctacaaagaaaaagtggtgccgcttgcagacattatcacgcccaaccagtttgaggccgagttactgagtggccggaagatccacagccaggaggaagccttgcgggtgatggacatgctgcactctatgggccccgacaccgtggtcatcaccagctccgacctgccctccccgcagggcagcaactacctgattgtgctggggagtcagaggaggaggaatcccgctggctccgtggtgatggaacgcatccggatggacattcgcaaagtggacgccgtctttgtgggcactggggacctgtttgctgccatgctcctggcgtggacacacaagcaccccaataacctcaaggtggcctgtgagaagaccgtgtctaccttgcaccacgttctgcagaggaccatccagtgtgcaaaagcccaggccggggaaggagtgaggcccagccccatgcagctggagctgcggatggtgcagagcaaaagggacatcgaggacccagagatcgtcgtccaggccacggtgctgtgagggccccgccgcttgcccgtgacacgcagcgcgttggtgtctccgtgtttgtccctgtgaaaacatgtaacgtctgccttagagccatgaccgaaacttgatatttttttctttcatgagtgtccggcatctgctggtcttcattgtgaaacgtgccagtcgtgctttgtgaaaaataacaaagtggtcacaaaaaaaaaaaaaaaaaa

SEQ ID NO: 242 - protein, 312 aa, Homo sapien
MEEECRVLSIQSHVIRGYVGNRAATFPLQVLGFEIDAVNSVQFSNHTGYAHWKGQVLNSDELQELYEGLRLNNMNKYDYVLTGYTRDKSFLAMVVDIVQELKQQNPRLVYVCDPVLGDKWDGEGSMYVPEDLLPVYKEKVVPLADIITPNQFEAELLSGRKIHSQEEALRVMDMLHSMGPDTVVITSSDLPSPQGSNYLIVLGSQRRRNPAGSVVMERIRMDIRKVDAVFVGTGDLFAAMLLAWTHKHPNNLKVACEKTVSTLHHVLQRTIQCAKAQAGEGVRPSPMQLELRMVQSKRDIEDPEIVVQATVL

SEQ ID NO: 243 - DNA, 1633 bp, Homo sapien
gaattccccccccccccccagtgctccgcgcgctcttgacgtccggagcccctggagtaggcgcttccggccattcatactgcagtcggtcagtgttcggttgaaggattctgtgtgctgtcggacccagagggtgacggcgccgctaggatgaagctcgtgagatttttgatgaaattgagtcatgaaactgtaaccattgaattgaagaacggaacacaggtccatggaacaatcacaggtgtggatgtcagcatgaatacacatcttaaagctgtgaaaatgaccctgaagaacagagaacctgtacagctggaaacgctgagtattcgaggaaataacattcggtattttattctaccagacagtttacctctggatacactacttgtggatgttgaacctaaggtgaaatctaagaaaagggaagctgttgcaggaagaggcagaggaagaggaagaggaagaggacgtggccgtggcagaggaagagggggtcctaggcgataatgtctctcaagatttcaaagtcatatgagatttgggatattttttgtacaggttgtgtttgtttatgtcagtttttaataaacataaatgtgggacagagctgtctatttagtatatcaaagttttagtagtttcctccacattcacgaaattaccacagtgagagctaagcatttctactgggcagtttcatttttagttgatcaggttttaagtttttgaactaaaatttttctttttctttttatgatgaataaggttaaaataaaagccttagacaaattaaatttggcagagtttaattgagcaaaggacaattcacaaatcaggtagcccctgaaccataataggctcagaggcttcagcccagctgcatagttgaagatttatggacagaaggaaagtgatgtatggaaaatggaagtgagatacagcaacagccggattagttacagttcagcgtttgccttatttgaatatggtttgaacagttcgctgtctttggttggctgaaacttagtgattgccacaagagtagggtaccgtctgtttacacgtccagttaggctacagttctatgtactgagaaacctttaagctgaacttgagatatgtaaagagactttaggctaaacttaacaatatatataggaatatatcccttctacttcacatgcactgaatatgcattttattgctttactcttcattctgtggcacctacccacaggggaagtaagaagtttgttttggtatttcggaaactaaagtccttatgggatggggtctagaattgattctcctttcctgagttttactccacggagtcttaggtacctggtaaaaagttgtcttctaaattaagggtcattgctttgttgtctagctgctaatgtcttacttttgtttcttttgctttttaatcagttcttaataggatatagttttatgttttccaagttataacttggagttaatggtcactagattatcagttatgagcagtgttaaaatctcctattaatgtgtaatgtacctgtcagtgcctcctttattaaggggttctttgagaataaaagagaaaagacctactttatttgacagcaaaaaaaaaaaggaattc

SEQ ID NO: 244 - protein, 119 aa, Homo sapien
MKLVRFLMKLSHETVTIELKNGTQVHGTITGVDVSMNTHLKAVKMTLKNREPVQLETLSIRGNNIRYFILPDSLPLDTLLVDVEPKVKSKKREAVAGRGRGRGRGRGRGRGRGRGGPRR

SEQ ID NO: 245 - DNA, 2319 bp, Homo sapien
cgaccacccggcctcggccaataagcgccgccctctcgcccccgtgttactgggtagaagaaaacaaaaacaaacagagcgagaagggccagagactctccgaggcggcggcagagacagaagagcggggtcggggccggctgaccaggaacctgggcgagcagcggcgggggcccgagggattctgaaggaagatttccattaggtaatttgtttaatcagtgcaagcgaaattaagggaaaatggatgtagaaaatgagcagatactgaatgtaaaccctgcagatcctgataacttaagtgactctctcttttccggtgatgaagaaaatgctgggactgaggaaataaagaatgaaataaatggaaattggatttcagcatcctccattaacgaagctagaattaatgccaaggcaaaaaggcgactaaggaaaaactcatcccgggactctggcagaggcgattcggtcagcgacagtgggagtgacgcccttagaagtggattaactgtgccaaccagtccaaagggaaggttgctggataggcgatccagatctgggaaaggaaggggactaccaaagaaaggtggtgcaggaggcaaaggtgtctggggtacacctggacaggtgtatgatgtggaggaggtggatgtgaaagatcctaactatgatgatgaccaggagaactgtgtttatgaaactgtagttttgcctttggatgaaagggcatttgagaagactttaacaccaatcatacaggaatattttgagcatggagatactaatgaagttgcggaaatgttaagagatttaaatcttggtgaaatgaaaagtggagtaccagtgttggcagtatccttagcattggaggggaaggctagtcatagagagatgacatctaagcttctttctgacctttgtgggacagtaatgagcacaactgatgtggaaaaatcatttgataaattgttgaaagatctacctgaattagcactggatactcctagagcaccacagttggtgggccagtttattgctagagctgttggagatggaattttatgtaatacctatattgatagttacaaaggaactgtagattgtgtgcaggctagagctgctctggataaggctaccgtgcttctgagtatgtctaaaggtggaaagcgtaaagatagtgtgtggggctctggaggtgggcagcaatctgtcaatcaccttgttaaagagattgatatgctgctgaaagaatatttactctctggagacatatctgaagctgaacattgccttaaggaactggaagtacctcattttcaccatgagcttgtatatgaagctattataatggttttagagtcaactggagaaagtacatttaagatgattttggatttattaaagtccctttggaagtcttctaccattactgtagaccaaatgaaaagaggttatgagagaatttacaatgaaattccggacattaatctggatgtcccacattcatactctgtgctggagcggtttgtagaagaatgttttcaggctggaataatttccaaacaactcagagatctttgtccttcaaggggcagaaagcgttttgtaagcgaaggagatggaggtcgtcttaaaccagagagctactgaatataagaactcttgcagtcttagatgttataaaaatatatatctgaattgtaagagttgttagcacaagttttttttttttttttttttaagcacttgttttgggtacaaggcatttctgacattttataaacctacatttaaggggaatttttaaaggaaatgttttttcttttttttttgtttttcgagggggcaaggagggacagaaaagtaacctcttcttaagtggaatattctaataagctaccttttgtaagtgccatgtttattatctaatcattccaagttttgcattgatgtctgactgccactcctttctttcaaggacagtgttttttgtagtaaaatcactggtttatacaaagctttatttagggggtaaagttaagctgctaaaaccccatgttggctgctgctgttgagatactgtgctttgggagtaaaaaaagaaagttatttctttgtcttaaagaatttttaaaaaattagtcatgagacttattcatctttccagggaacatactgattggtcttaaaagactagacagttaagtaaaaggtggctggaacatctatttttctacaaaactggaaaaatgaacctggttctagaagaatgtacaccaaaataaaacatgtgaagcagtaaaaaaaaaaaaaaaa

SEQ ID NO: 246 - protein, 469 aa, Homo sapien
MDVENEQILNVNPADPDNLSDSLFSGDEENAGTEEIKNEINGNWISASSINEARINAKAKRRLRKNSSRDSGRGDSVSDSGSDALRSGLTVPTSPKGRLLDRRSRSGKGRGLPKKGGAGGKGVWGTPGQVYDVEEVDVKDPNYDDDQENCVYETVVLPLDERAFEKTLTPIIQEYFEHGDTNEVAEMLRDLNLGEMKSGVPVLAVSLALEGKASHREMTSKLLSDLCGTVMSTTDVEKSFDKLLKDLPELALDTPRAPQLVGQFIARAVGDGILCNTYIDSYKGTVDCVQARAALDKATVLLSMSKGGKRKDSVWGSGGGQQSVNHLVKEIDMLLKEYLLSGDISEAEHCLKELEVPHFHHELVYEAIIMVLESTGESTFKMILDLLKSLWKSSTITVDQMKRGYERIYNEIPDINLDVPHSYSVLERFVEECFQAGIISKQLRDLCPSRGRKRFVSEGDGGRLKPESY

SEQ ID NO: 247 - DNA, 2319 bp, Homo sapien; identical to SEQ ID NO: 245

SEQ ID NO: 248 - protein, 458 aa, Homo sapien
MTKYPDNLSDSLFSGDEENAGTEEIKNEINGNWISASSINEARINAKAKRRLRKNSSRDSGRGDSVSDSGSDALRSGLTVPTSPKGRLLDRRSRSGKGRGLPKKGGAGGKGVWGTPGQVYDVEEVDVKDPNYDDDQENCVYETVVLPLDERAFEKTLTPIIQEYFEHGDTNEVAEMLRDLNLGEMKSGVPVLAVSLALEGKASHREMTSKLLSDLCGTVMSTTDVEKSFDKLLKDLPELALDTPRAPQLVGQFIARAVGDGILCNTYIDSYKGTVDCVQARAALDKATVLLSMSKGGKRKDSVWGSGGGQQSVNHLVKEIDMLLKEYLLSGDISEAEHCLKELEVPHFHHELVYEAIIMVLESTGESTFKMILDLLKSLWKSSTITVDQMKRGYERIYNEIPDINLDVPHSYSVLERFVEECFQAGIISKQLRDLCPSRGRKRFVSEGDGGRLKPESY

SEQ ID NO: 249 - DNA, 1073 bp, Homo sapien
cggagccagcgtgggaggccgctgccgtcgcgcgccttggtttttctgttccttttttttttttttttttaacttcctgcctatcacacgcagccatcagcccacaaagacatgactaccaacgcgggccccttgcacccatactggcctcagcacctaagactggacaactttgtacctaatgaccgccccacctggcatatactggctggcctcttctctgtcacaggggtcttagtcgtgaccacatggctgttgtcaggtcgtgctgcggttgtcccattggggacttggcggcgactgtccctgtgctggtttgcagtgtgtgggttcattcacctggtgatcgagggctggttcgttctctactacgaagacctgcttggagaccaagccttcttatctcaactctggaaagagtatgccaagggagacagccgatacatcctgggtgacaacttcacagtgtgcatggaaaccatcacagcttgcctgtggggaccactcagcctgtgggtggtgatcgcctttctccgccagcatcccctccgcttcattctacagcttgtggtctctgtgggccagatctatggggatgtgctctacttcctgacagagcaccgcgacggattccagcacggagagctgggccaccctctctacttctggttttactttgtcttcatgaatgccctgtggctggtgctgcctggagtccttgtgcttgatgctgtgaagcacctcactcatgcccagagcacgctggatgccaaggccacaaaagccaagagcaagaagaactgaggagtggtggaccaggctcgaacactggccgaggaggagctctctgcctgccagaagagtctagtcctgctcccacagtttggagggacaaagctaattgatctgtcacactcaggctcatgggcaggcacaagaaggggaataaaggggctgtgtgaaggcactgctgggagccattagaacacagatacaagagaagccaggaggtctatgatggtgacgatttttaaaatcaggaaataaaagatcttgactctaaaaaaaaaaaa

SEQ ID NO: 250 - protein, 230 aa, Homo sapien [sequence omitted]

SEQ ID NO: 251 - DNA, 5398 bp, Homo sapien
cgtgcggcggtgggctggtcttccgcggccggcgttgcgccgcggcggagggtgggcgcgcggggagcgggatggagctggggcgacccttgctggaggtactggcctcagccctttctcccgcttccccacccctcttacccccagattacattctctgtgtggtgtctttactgcagatgaaggatttgggggcagagcacttggcaggtcatgaaggggtccaacttctcgggttgttgaacgtctacctggaacaagaagagagattccaacctcgagaaaaagggctgagtttgattgaggctaccccggagaatgataacactttgtgtccaggattgagaaatgccaaagttgaagatttaaggagtttagccaacttttttggatcttgcactgaaacttttgtcctggctgtcaatattttggacaggttcttggctcttatgaaggtgaaacctaaacatttgtcttgcattggagtctgttcttttttgctggctgctagaatagttgaagaagactgcaatattccatccactcatgatgtgatccggattagtcagtgtaaatgtactgcttctgacataaaacggatggaaaaaataatttcagaaaaattgcactatgaattggaagctactactgccttaaactttttgcacttataccatactattatactttgtcatacttcagaaaggaaagaaatactgagccttgataaactagaagctcagctgaaagcttgcaactgccgactcatcttttcaaaagcaaaaccatctgtattagccttgtgccttctcaatttggaagtggaaactttgaaatctgttgaattactggaaattctcttgctagttaaaaaacattccaagattaatgacactgagttcttctactggagagagttggtttctaaatgcctagccgagtattcttctcctgaatgttgcaaaccagatcttaagaagttggtttggatcgtttcaaggcgcacagcccagaacctccacaacagctactatagtgttcctgagctgccaacgatacctgaggggggttgttttgatgaaagtgaaagtgaggactcttgtgaagatatgagttgtggagaggagagtctcagcagctctcctcccagtgatcaagagtgcaccttctttttcaacttcaaagtggcacaaacactgtgctttccatcttagaaatctgattgttctgtcagaatttatatttacaggtttcaaagcaataaatgggggaataggtagtttcctggtttagcccccatctagtcaggaattaatatactggaatacctaccttctatttgttattcagatcagatctggcctattttcatatttatcctaagccatcaaatggggtagtgcctcttaaaccattaacagtactttagacattggcactttatttttctcgtagatctttagctactttggggaggagggaaggtgctgataccttcaatttgttacttttcaagatttttaaaaataactagtgtagcttatcttaaacattttataaaaccttcagatgtctttaagcagattggaagtatgcaagtgcttccttagcagggacagtggataatccttaatggtttatcatagatttcaccctccccccttctcagaagagtgagtatgctcttaaatgtcaaacacatttttgttgttttgttttttaaatgatcagtgtctatttgatgtgatgcagatcttataaatttgggaattataatattgacatttctgtgatttttatatatgtaatgtcttaattgagatttctgttaaggcagaaataattaggctagggctcttagttttcattcctattgcccaagtattgtcaaactatggtattattttaatgttactttaaaaatccataatctgctagttttgcatgtacttatatgaaaacagtgcagtaagttgaaaactcagtatctatggaattgataaatgttgatctggtgtagtatattttatcgcattttcttatattaaaaaatgtctgcatgattacattttatttcctttgtaatttacatttcagaatagtgtattgctatatgggtgccaagattgaatatgaagaacccgagtgtttgtagtattatagttttaagcaaatctgtgtggtgatacagccataagaatggggcttatataaactctgtacatgtaagattttgtacagagaatttttaactttataaattgtatatgaacatgtaaatcttttaaaatgtacataaaatactgtatttttttaccttgtgtgtgatagtctagtcattgcatgtaaatataatttattatgtattctgtagtataaatcatacattgatgacttacatttttactggtaagtcaacatccgttggatgttttctgaagtggctctttttgaagtgataatagattgtaattcaaaataaaattattaatgaattctccttgtttgggatcacatcttaatttttaatctgttaaaagttcttgatgtattttaatgagaagactttaggtgaggctacagtgattccagagtgagccttctaactggctagcagaagttctctaggtttggcatctgtgccttggagatactgaaagagaatctgtcatttgacaattgacctctttgtgggatggactcattaagtatgctctcagagactggtatattaccagaatgcctattaattttcagtgagaggcaacaggtattaagtagaacagaatgctcaggttggcagattagaacgatctttcaggagacaaagcaagttttaatcagttgtttggttaataagtatggggtgttcgctgtgatagggccccgccagcttctggctcttgtggacctcaaaagtatcaggtggttttgcaagtggtggtcctttcccctgccccaccccaataggttccccatctgtctagtttgatttttgtagacctttgttttctctagttagaaaatcaggtacactgaatatggttttcatgtaacacctcttctctggagataggggtatgttttcctacccttctagtggagaatcctacttgaggatgacctttcctctcttactaaataatattagtaaatagtgggcaatatattctgctttcagattttgatttgttgagatgtaaaagttgtttggggcttaccaaatctcaagactctctttagctcctgcaggattgtattgcttttcttactggatatttttcctgggtaagcatctttgtggcttcatctcttccccctgtggttttcagtgtatttagtcgagacctctctgctgagcttgcaacctgtttattcacatggcctgccatgccacttggaggtttctgattactcccaaacctgctggttctttatgtctttctcagcgaataattccatctgttcatgttggaaacttaggtgatatgctcatctccttttgcctgtttatggaggtcaccagcctctatcatttgtatgatttcgtttacactgtttatatctctctgtcccccctttttctgccattggcatggtttagacctgtactctttatcagcagaggtactgtaatatatttgtgatccctcagcttccaggcttactcctggtctctgccttcctatctacatatccttttaaaataaaattttaactatctcctgaaaaattgttgagtaggtcacgcacaatcaggagaaaaatctattcatgacatacaagtctctgtctaatctgaacactgcacctgtctctggcctttttttcttgtcatttcctagaccttaaaaaatgtgtattgagaaagaactctgttagctatacagaagatgaactgggcaatatagagtagcagcatggagaccagtctgactgaactaaggcagtggaagtgtggatgaggaagagaggtgaaaattgagaagcgctatcctttctctttgggcattattaggaggctcacagacaagtccaggagtctggttataccctcctgtgccattcaaccaggtggctttcccatgactgtgatgaataaaattgagaagcccctgcccttttcagagcagagggtgaggagaaagctaccattttgtcctcatccttacccccgttgacttggcgagagatttgacctttcaggttttgatcctgtcattttctaggatgtggtgcacgcactttgctgttgcgcatggtgaagtattgtgcctaggtcctgggtcttcatctgtttggctctgctactgtttcctcctcccaggaagtgtggttagacaaataatgtgttttaattacctgtcacactcaggattaatacatactcaggttaactgtagagaggcattggcttcagaacactcctcgtgacaattttaaccattttctttgtctagagtctgcctttttcttttttacaatttcttttatttcaacactaggtttcaatatggtgttcctgctacctcccacctccctcctccctcatcacacatgcaaattgtcagcttattgagacaacccacttagattcatatatggacaaggacaaggtattttgcatttgttactggaattcagttttcctaactatttactaccagaaatggtcaataacttactttgtggttagcaaatcaaattgtgtgatagatagtttcccagtatgatggccagtcagtctttccatccctgtgcctacatgctgctcttcccgtccacaagtggagtctgtttctcttgagttttggctggccttatgaatggctttgcttactgaagtgcagcagaagaaatttagtatatgtccaagcctaggctttaagagactggcagctttccttttatcctttttggaagctagccaccatgctgcaaagaagctcagctggattactgaaagatgagaggccatgtggagagagactcttgaggatgagagattatcttggatgttccagccttaagctcccagctgaatgtgggtgtatcctcagctacaccacagaaaacagaggaactactcagtcgatcccaatcaacccacagactcactagaaataacaaattattgttttaagccacgaggttttgggggagggttgttaaacagtaatagataagtgagacagattgcttgttatttatggtcaaatggtgattatctctggtgagattacaggtgatgttttttttaagttatgcctatctgtagtttcctttttttcctaaaattgatttgaattattagtgtattaacagaataaagaatgaactttaaaacacacacgctggttatatgcttcctctaattaaaattcatggctctcaccac

SEQ ID NO: 252 - protein, 403 aa, Homo sapien
CGGGLVFRGRRCAAAEGGRAGSGMELGRPLLEVLASALSPASPPLLPPDYILCVVSLLQMKDLGAEHLAGHEGVQLLGLLNVYLEQEERFQPREKGLSLIEATPENDNTLCPGLRNAKVEDLRSLANFFGSCTETFVLAVNILDRFLALMKVKPKHLSCIGVCSFLLAARIVEEDCNIPSTHDVIRISQCKCTASDIKRMEKIISEKLHYELEATTALNFLHLYHTIILCHTSERKEILSLDKLEAQLKACNCRLIFSKAKPSVLALCLLNLEVETLKSVELLEILLLVKKHSKINDTEFFYWRELVSKCLAEYSSPECCKPDLKKLVWIVSRRTAQNLHNSYYSVPELPTIPEGGCFDESESEDSCEDMSCGEESLSSSPPSDQECTFFFNFKVAQTLCFPS

SEQ ID NO: 253 - DNA, 2044 bp, Homo sapien
ccggtcggatgccggaccgggggcaccgctgaggcggtgggtccccgacctgcgagacaggtttggaagcccccgctgcgcccagtccgtgcggaccgcgaggccgcgggcgggtggaggcgcgtctccggcacgatgaaggatttgggggcagagcacttggcaggtcatgaaggggtccaacttctcgggttgttgaacgtctacctggaacaagaagagagattccaacctcgagaaaaagggctgagtttgattgaggctaccccggagaatgataacactttgtgtccaggattgagaaatgccaaagttgaagatttaaggagtttagccaacttttttggatcttgcactgaaacttttgtcctggctgtcaatattttggacaggttcttggctcttatgaaggtgaaacctaaacatttgtcttgcattggagtctgttcttttttgctggctgctagaatagttgaagaagactgcaatattccatccactcatgatgtgatccggattagtcagtgtaaatgtactgcttctgacataaaacggatggaaaaaataatttcagaaaaattgcactatgaattggaagctactactgccttaaactttttgcacttataccatactattatactttgtcatacttcagaaaggaaagaaatactgagccttgataaactagaagctcagctgaaagcttgcaactgccgactcatcttttcaaaagcaaaaccatctgtattagccttgtgccttctcaatttggaagtggaaactttgaaatctgttgaattactggaaattctcttgctagttaaaaaacattccaagattaatgacactgagttcttctactggagagagttggtttctaaatgcctagccgagtattcttctcctgaatgttgcaaaccagatcttaagaagttggtttggatcgtttcaaggcgcacagcccagaacctccacaacagctactatagtgttcctgagctgccaacgatacctgaggggggttgttttgatgaaagtgaaagtgaggactcttgtgaagatatgagttgtggagaggagagtctcagcagctctcctcccagtgatcaagagtgcaccttctttttcaacttcaaagtggcacaaacactgtgctttccatcttagaaatctgattgttctgtcagaatttatatttacagggtttcaaagcaataaatgggggaataggtagtttcctggtttagcccccatctagtcaggaattaatatactggaatacctaccttctatttgttattcagatcagatctggcctattttcatatttatcctaagccatcaaatggggtagtgcctcttaaaccattaacagtactttagacattggcactttatttttctcgtagatctttagctactttggggaggagggaaggtgctgataccttcaatttgttacttttcaagatttttaaaaataactagtgtagcttatcttaaacattttataaaaccttcagatgtctttaagcagattggaagtatgcaagtgcttccttagcagggacagtggataatccttaatggtttatcatagatttcaccctccccccttctcagaagagtgagtatgctcttaaatgtcaaacacatttttgttgttttgttttttaaatgatcagtgtctatttgatgtgatgcagatcttataaatttgggaattataatattgacatttctgtgatttttatatatgtaatgtcttaattgagatttgtgttaaggcagaaataattaggctagggctcttagttttcattcctattgccccaagtattgtcaaactatggtattattttaatgttactttaaaaatccataatctgctagttttgcatgtacttatatgaaaacagtgcagtaagttgaaaactcagtatctatggaattgataaatgttgatctggtgtagtatattttatccgcattttcttatattaaaaaatgttctgcatgattacattttatttgcctttgt

SEQ ID NO: 254 - protein, 344 aa, Homo sapien
MKDLGAEHLAGHEGVQLLGLLNVYLEQEERFQPREKGLSLIEATPENDNTLCPGLRNAKVEDLRSLANFFGSCTETFVLAVNILDRFLALMKVKPKHLSCIGVCSFLLAARIVEEDCNIPSTHDVIRISQCKCTASDIKRMEKIISEKLHYELEATTALNFLHLYHTIILCHTSERKEILSLDKLEAQLKACNCRLIFSKAKPSVLALCLLNLEVETLKSVELLEILLLVKKHSKINDTEFFYWRELVSKCLAEYSSPECCKPDLKKLVWIVSRRTAQNLHNSYYSVPELPTIPEGGCFDESESEDSCEDMSCGEESLSSSPPSDQECTFFFNFKVAQTLCFPS

SEQ ID NO: 255 - DNA, 890 bp, Homo sapien
ggcggaccgaagaacgcaggaagggggccggggggacccgcccccggccggccgcagccatgaactccaacgtggagaacctacccccgcacatcatccgcctggtgtacaaggaggtgacgacactgaccgcagacccacccgatggcatcaaggtctttcccaacgaggaggacctcaccgacctccaggtcaccatcgagggccctgaggggaccccatatgctggaggtctgttccgcatgaaactcctgctggggaaggacttccctgcctccccacccaagggctacttcctgaccaagatcttccacccgaacgtgggcgccaatggcgagatctgcgtcaacgtgctcaagagggactggacggctgagctgggcatccgacacgtactgctgaccatcaagtgcctgctgatccaccctaaccccgagtctgcactcaacgaggaggcgggccgcctgctcttggagaactacgaggagtatgcggctcgggcccgtctgctcacagagatccacgggggcgccggcgggcccagcggcagggccgaagccggtcgggccctggccagtggcactgaagcttcctccaccgaccctggggccccagggggcccgggaggggctgagggtcccatggccaagaagcatgctggcgagcgcgataagaagctggcggccaagaaaaagacggacaagaagcgggcgctgcgggcgctgcggcggctgtagtgggctctcttcctccttccaccgtgaccccaacctctcctgtcccctccctccaactctgtctctaagttatttaaattatggctggggtcggggagggtacagggggcactgggacctggatttgtttttctaaataaagttggaaaagca

SEQ ID NO: 256 - protein, 225 aa, Homo sapien
MNSNVENLPPHIIRLVYKEVTTLTADPPDGIKVFPNEEDLTDLQVTIEGPEGTPYAGGLFRMKLLLGKDFPASPPKGYFLTKIFHPNVGANGEICVNVLKRDWTAELGIRHVLLTIKCLLIHPNPESALNEEAGRLLLENYEEYAARARLLTEIHGGAGGPSGRAEAGRALASGTEASSTDPGAPGGPGGAEGPMAKKHAGERDKKLAAKKKTDKKRALRALRRL

SEQ ID NO: 257 - DNA, 5496 bp, Homo sapien
attcagccggtgcgcgcggcggcgggaggcagtggctggggagtcccgtcgacgctctgttccgagagcgtgccccggaccgccagctcagaacaggggcagccgtgtagccgaacggaagctgggagcagccgggactggtggcccgcgcccgagctccgcaggcgggaagcaccctggatttgggaagtcccgggagcagcgcggcggcacctccctcacccaaggggccgcggcgacggtcacggggcgcggcgccaccgtgagcgacccaggccaggattctaaatagacggcccaggctcctcctccgcccgggccgcctcacctgcgggcattgccgcgccgcctccgccggtgtagacggcacctgcgccgccttgctcgcgggtctccgcccctcgcccaccctcactgcgccaggcccaggcagctcacctgtactggcgcgggctgcggaagcctgcgtgagccgaggcgttgaggcgcggcgcccacgccactgtcccgagaggacgcaggtggagcgggcgcggcttcgcggaacccggcgccggccgccgcagtggtcccagcctacaccgggttccggggacccggccgccagtgcccggggagtagccgccgccgtcggctgggcaccatgaacagcagcagcgccaacatcacctacgccagtcgcaagcggcggaagccggtgcagaaaacagtaaagccaatcccagctgaaggaatcaagtcaaatccttccaagcggcatagagaccgacttaatacagagttggaccgtttggctagcctgctgcctttcccacaagatgttattaataagttggacaaactttcagttcttaggctcagcgtcagttacctgagagccaagagcttctttgatgttgcattaaaatcctcccctactgaaagaaacggaggccaggataactgtagagcagcaaatttcagagaaggcctgaacttacaagaaggagaattcttattacaggctctgaatggctttgtattagttgtcactacagatgctttggtcttttatgcttcttctactatacaagattatctagggtttcagcagtctgatgtcatacatcagagtgtatatgaacttatccataccgaagaccgagctgaatttcagcgtcagctacactgggcattaaatccttctcagtgtacagagtctggacaaggaattgaagaagccactggtctcccccagacagtagtctgttataacccagaccagattcctccagaaaactctcctttaatggagaggtgcttcatatgtcgtctaaggtgtctgctggataattcatctggttttctggcaatgaatttccaagggaagttaaagtatcttcatggacagaaaaagaaagggaaagatggatcaatacttccacctcagttggctttgtttgcgatagctactccacttcagccaccatccatacttgaaatccggaccaaaaattttatctttagaaccaaacacaaactagacttcacacctattggttgtgatgccaaaggaagaattgttttaggatatactgaagcagagctgtgcacgagaggctcaggttatcagtttattcatgcagctgatatgctttattgtgccgagtcccatatccgaatgattaagactggagaaagtggcatgatagttttccggcttcttacaaaaaacaaccgatggacttgggtccagtctaatgcacgcctgctttataaaaatggaagaccagattatatcattgtaactcagagaccactaacagatgaggaaggaacagagcatttacgaaaacgaaatacgaagttgccttttatgtttaccactggagaagctgtgttgtatgaggcaaccaacccttttcctgccataatggatcccttaccactaaggactaaaaatggcactagtggaaaagactctgctaccacatccactctaagcaaggactctctcaatcctagttccctcctggctgccatgatgcaacaagatgagtctatttatctctatcctgcttcaagtacttcaagtactgcaccttttgaaaacaactttttcaacgaatctatgaatgaatgcagaaattggcaagataatactgcaccgatgggaaatgatactatcctgaaacatgagcaaattgaccagcctcaggatgtgaactcatttgctggaggtcacccagggctctttcaagatagtaaaaacagtgacttgtacagcataatgaaaaacctaggcattgattttgaagacatcagacacatgcagaatgaaaaatttttcagaaatgatttttctggtgaggttgacttcagagacattgacttaacggatgaaatcctgacgtatgtccaagattctttaagtaagtctcccttcataccttcagattatcaacagcaacagtccttggctctgaactcaagctgtatggtacaggaacacctacatctagaacagcaacagcaacatcaccaaaagcaagtagtagtggagccacagcaacagctgtgtcagaagatgaagcacatgcaagttaatggcatgtttgaaaattggaactctaaccaattcgtgcctttcaattgtccacagcaagacccacaacaatataatgtctttacagacttacatgggatcagtcaagagttcccctacaaatctgaaatggattctatgccttatacacagaactttatttcctgtaatcagcctgtattaccacaacattccaaatgtacagagctggactaccctatggggagttttgaaccatccccataccccactacttctagtttagaagattttgtcacttgtttacaacttcctgaaaaccaaaagcatggattaaatccacagtcagccataataactcctcagacatgttatgctggggccgtgtcgatgtatcagtgccagccagaacctcagcacacccacgtgggtcagatgcagtacaatccagtactgccaggccaacaggcatttttaaacaagtttcagaatggagttttaaatgaaacatatccagctgaattaaataacataaataacactcagactaccacacatcttcagccacttcatcatccgtcagaagccagaccttttcctgatttgacatccagtggattcctgtaattccaagcccaattttgaccctggtttttggattaaattagtttgtgaaggattatggaaaaataaaactgtcactgttggacgtcagcaagttcacatggaggcattgatgcatgctattcacaattattccaaaccaaattttaatttttgcttttagaaaagggagtttaaaaatggtatcaaaattacatatactacagtcaagatagaaagggtgctgccacggagtggtgaggtaccgtctacatttcacattattctgggcaccacaaaatatacaaaactttatcagggaaactaagattcttttaaattagaaaatattctctatttgaattatttctgtcacagtaaaaataaaatactttgagttttgagctactggattcttattagttccccaaatacaaagttagagaactaaactagtttttcctatcatgttaacctctgcttttatctcagatgttaaaataaatggtttggtgctttttataaaaagataatctcagtgctttcctccttcactgtttcatctaagtgcctcacatttttttctacctataacactctaggatgtatattttatataaagtattctttttcttttttaaattaatatctttctgcacacaaatattatttgtgtttcctaaatccaaccaattttcattaattcaggcatattttaactccactgcttacctactttcttcaggtaaaagggcaaataatgatcgaaaaaataattatttattacataatttagttgtttctagactataaatgttgctatgtgccttatgttgaaaaaatttaaaagtaaaatgtctttccaaattatttcttaattattataaaaatattaagacaatagcacttaaattcctcaacagtgttttcagaagaaataaatataccactctttacctttattgatatctccatgatgatagttgaatgttgcaatgtgaaaaatctgctgttaactgcaaccttgtttattaaattgcaagaagctttatttctagctttttaattaagcaaagcacccatttcaatgtgtataaattgtctttaaaaactgttttagacctataatccttgataatatattgtgttgactttataaatttcgcttcttagaacagtggaaactatgtgtttttctcatatttgaggagtgttaagattgcagatagcaaggtttggtgcaaagtattgtaatgagtgaattgaatggtgcattgtatagatataatgaacaaaattatttgtaagatatttgcagtttttcattttaaaaagtccataccttatatatgcacttaatttgttggggctttacatactttatcaatgtgtctttctaagaaatcaagtaatgaatccaactgcttaaagttggtattaataaaaagacaaccacatagttcgtttaccttcaaactttaggtttttttaatgatatactgatcttcattaccaataggcaaattaatcaccctaccaactttactgtcctaacatggactttcaaaaagaaaaaatgacaccatcttttattctttttttttttttttttttgagagagagtcttactctgccgcccaaactggagtgcagtggcacaatcttggctcactgcaacctctacctcctgggttcaagtgattctcttgcctcagcctcccgagttgctgggattgcgggcatggtggcgtgagcctgtagtcctagctactcgggaggctgaggcaggagaatagcctgaacctgggaatcggaggttgcagggccaagatcgccccactgcactccagcctggcaatagaccgagctccgtctccaaaaaaaaaaatacaatttttatttcttttactttttttagtaagttaatgtatataaaaatggcttcggacaaaatatctctgagttctgtgtattttcagtcaaaactttaaacctgtagaatcaatttaagtgttgaaaaaaatttgtctgaaacatttcataatttgtttccagcatgaggtatctaaggatttagaccagaggtctagattaatactctatttttacatttaaaccttttattataagtcttacataaaccatttttgttactctcttccacatgttactggataaattgtttagtggaaaataggctttttaatcatgaatatgatgacaatcagttatacagttataaaattaaaagtttgaaaagcaatattgtatatttttatctatataaaataactaaaatgtatctaagaataataaaatcacgttaaacc

SEQ ID NO: 258 - protein, 848 aa, Homo sapien
MNSSSANITYASRKRRKPVQKTVKPIPAEGIKSNPSKRHRDRLNTELDRLASLLPFPQDVINKLDKLSVLRLSVSYLRAKSFFDVALKSSPTERNGGQDNCRAANFREGLNLQEGEFLLQALNGFVLVVTTDALVFYASSTIQDYLGFQQSDVIHQSVYELIHTEDRAEFQRQLHWALNPSQCTESGQGIEEATGLPQTVVCYNPDQIPPENSPLMERCFICRLRCLLDNSSGFLAMNFQGKLKYLHGQKKKGKDGSILPPQLALFAIATPLQPPSILEIRTKNFIFRTKHKLDFTPIGCDAKGRIVLGYTEAELCTRGSGYQFIHAADMLYCAESHIRMIKTGESGMIVFRLLTKNNRWTWVQSNARLLYKNGRPDYIIVTQRPLTDEEGTEHLRKRNTKLPFMFTTGEAVLYEATNPFPAIMDPLPLRTKNGTSGKDSATTSTLSKDSLNPSSLLAAMMQQDESIYLYPASSTSSTAPFENNFFNESMNECRNWQDNTAPMGNDTILKHEQIDQPQDVNSFAGGHPGLFQDSKNSDLYSIMKNLGIDFEDIRHMQNEKFFRNDFSGEVDFRDIDLTDEILTYVQDSLSKSPFIPSDYQQQQSLALNSSCMVQEHLHLEQQQQHHQKQVVVEPQQQLCQKMKHMQVNGMFENWNSNQFVPFNCPQQDPQQYNVFTDLHGISQEFPYKSEMDSMPYTQNFISCNQPVLPQHSKCTELDYPMGSFEPSPYPTTSSLEDFVTCLQLPENQKHGLNPQSAIITPQTCYAGAVSMYQCQPEPQHTHVGQMQYNPVLPGQQAFLNKFQNGVLNETYPAELNNINNTQTTTHLQPLHHPSEARPFPDLTSSGFL

SEQ ID NO: 259 - DNA, 2371 bp, Homo sapien
agctggctgagaggggactgggcgccggcggggaaggaggagcgctaggtcggtgtacgaccgagattagggtgcgtgccagctccgggaggccgcggtgaggggccgggcccaagctgccgacccgagccgatcgtcagggtcgccagcgcctcagctctgtggaggagcagcagtagtcggagggtgcaggatattagaaatggctactccccagtcaattttcatctttgcaatctgcattttaatgataacagaattaattctggcctcaaaaagctactatgatatcttaggtgtgccaaaatcggcatcagagcgccaaatcaagaaggcctttcacaagttggccatgaagtaccaccctgacaaaaataagagcccggatgctgaagcaaaattcagagagattgcagaagcatatgaaacactctcagatgctaatagacgaaaagagtatgatacacttggacacagtgcttttactagtggtaaaggacaaagaggtagtggaagttcttttgagcagtcatttaacttcaattttgatgacttatttaaagactttggcttttttggtcaaaaccaaaacactggatccaagaagcgttttgaaaatcatttccagacacgccaggatggtggttccagtagacaaaggcatcatttccaagaattttcttttggaggtggattatttgatgacatgtttgaagatatggagaaaatgttttcttttagtggttttgactctaccaatcagcatacagtacagactgaaaatagatttcatggatctagcaagcactgcaggactgtcactcaacgaagaggaaatatggttactacatacactgactgttcaggacagtagttcttattctattctcactaaatccaactggttgactcttcctcattatctttgatgctaaacaattttctgtgaactattttgacaagtgcatgatttcactttaaacaatttgatatagctattaaatatatttaagggttttttttttttgacaaattcaacattcaacgagtagacaaaatgctaattatttccctgattaggaaagtttctttaaaaaacacgtaattttgcctagtgctttttctctacctgcccttgggctcactaatatcaccagtattattaccaagaaaatattgagtttacctgattaaactttaaaagttaattgtagatttaaattgtgtgaacctaatgatttttgcagtgaaacctttactaattcaaagttgcatgttctatgacatctgtgacttgcgttgcagagtgtacatgaaactgtataattgagtcattcagtaaaggagaacagtatcttggttaattgctactgaaaggttgagaaaggaatggtttgatatttaccacagcgctgtgcctttctacagtagaactggggtaaaggaaatggttttattgcccatagtcatttaggctggaaaaaagttgaaaacttaacgaaatattgccaagagattgttatgtgtttggttccagcctaaaaatgattttgtagtgttgaaatcatagctacttacatagctttttcatatttctttcttagttgttggcactcttaggtcttagtatggatttatgtgtttgtgtgtgtgtagtttatcctctctctcatctttatctagagattgactgatacctcattctgtttgtaaaaccagccagtaatttctgtgcaaccttactatgtgcaatatttttaaatcctgagaaatgtgtgcttttgttttcggatagacttatttctttagttctgcacttttccacattatactccatatgagtattaatcctatggatacatattaaaacaagtgtctcatacaacattgtatgtgagagaaatataaatatttacaacctgatattcgttgttgttttattgttaaaagtttattatgcaactctggaggtatagagggcatataagctatgggacatatgctgatcacaggctatattcatgaagttacttttgaccaacctgaaaactgataggattttgtttgtcatttggtaatttctactgcattcttaccatccttctctcacaaattttgatagcttgaagatctttttaattataattttgttgtatttgtttcctaggagcaagtgttcctgctgccagttctttcctctttaggcgtggttgagaaaaagcagaaactttacataaagctgtatttcttaatcatctttaatttgaaacttaagaaaatgaatttattctgttatatttatgtaacttatttcctggaagttatatctactagttttgtttgataataataaaattagctataccttgaa

SEQ ID NO: 260 - protein, 223 aa, Homo sapien
MATPQSIFIFAICILMITELILASKSYYDILGVPKSASERQIKKAFHKLAMKYHPDKNKSPDAEAKFREIAEAYETLSDANRRKEYDTLGHSAFTSGKGQRGSGSSFEQSFNFNFDDLFKDFGFFGQNQNTGSKKRFENHFQTRQDGGSSRQRHHFQEFSFGGGLFDDMFEDMEKMFSFSGFDSTNQHTVQTENRFHGSSKHCRTVTQRRGNMVTTYTDCSGQ

SEQ ID NO: 261 - DNA, 3262 bp, Homo sapien
aggaaatggtttctggaaaacgttagtaaggtcagtttttaaacactgaatccaaggttgtcttctggaatatccaaattggttatgaccagaatgtgattcattatactaagctaaaggaatagattaaagaattagcaacagtggccgggtgcagtggctcatgcctgtaaccccagcactttgggggaggcccaggtgggtggatcatttgaggtcaggagtttgagaccagcctggccaacatggtgaaacctaaaaatacaaaaattagccaggtgtggtggcaggtgcttgtaatcccagctgcttgggaggctgaagcaggagaattgcttgaacccggaggcaggggttgcagtgagccaagatcacaccattgcactccagcctgggtggcagagtgagactctgtctcaaaaattaaaaagcaacagtgtatatgcaatagttgcaagatgtaagatcacccaaagagtatgcagagggaaatgagggacagaacccagaaatattaatacccagggagtgaacaggaggaggaccccaagaagttactgagtcagatttttcccactcatccaggtgaaagtttaggtcaataatgtgaaataccagagggattaaatgtctacagaaataaaaccatgtctcacattaagacaaacaagtaggttggagggatattttgaaaggcaaggtgatattaaactttattctgaaagtagtttgttagagaaagaggcatgataagagttgcagttaactgattggaaactatgcagcagatgaaactggaataaaggaaactcatcaggaaatgattatagtaataagggccagaaataagggcttgcttgcctgaactaaaaacaaagaggatacaaaggttctagaaatatttcaaaggaattagctttaattcagcaatactcattgagaatcacctatgcacctggctctgaagatgaagtgctgagtaaacttagacatggaccctgctatcatggagatggcagattattggtcagaatgctcttacctgtcattgtagcaattttgttagatccttaatacctctgaattgctaataaacttgttttggctgaaaaaatagtcctgtgaattttaccatgcagttaaataagaaactaaaagcaaacctaaataccaccaaaaaggttagtagtctgttatatgcattagccttaatctaaggaaatattttattataggtctccttgaagaaaatgatattttcaggaatgctcaagcaggtgttctcatcagcactaatagtcatccaatcttaaggaaaaacagaatatttgatggatttgccgcaggtattgaaattacaaatcacgcaactgcaacactagaaggcaatcagatttttaacaaccggtttggaggcttatttttagcatctggtgttaatgtgacaatgaaagataacaaaataatgaacaatcaagatgccatagaaaaggctgttagtagaggccaatgtttatataaaatatcaagttataccagctatcccatgcatgatttctacagatgtcatacttgtaacaccacagatcgaaatgccatatgtgtgaactgcattaagaagtgccatcagggacatgatgtagagtttattagacatgataggtatgtagcacacttgcttgatatattacccaattactttccccctcacttttctaatatttgggtttcattttgctttaggtttttctgtgactgtggtgctggaacactgtctaatccttgtacattagctggtgagcctacacatgatacagatacactatatgactctgctccacctatagaatctaatacattgcagcacaactgaattccttccctaaagaaaaagtcctgccattgtaacatcataacttaaaacacttttttggaagaagatttaaaatatttgcccatgctacaggaagagactgtattaaaaatggatacacaaggtcagttgacactatgaagctcaagctaccaaaaagaaagtggcaatatattgactcaggatctcaaagctgggtgttttagcattactgtgtaaagacttgaagggacagaagtgaagaaaataagctgcaattttgtacagataccaacttctgaaaagctggtgtttttacaactagcattgaatgcagtccaatttgcagtagtaatcttcaatagacaagcagctttgttgctgcctttatggacatgggtaccaattgcttttgtaatatggtaaaaatgtgagctagcacttctgcgttccttttgattttttttttttaacatgtattcagattgagaaatatgattttaatgccttaatctcatgtagtttgtttttaatttcaagcaaaatcttactgtacttgaatgtgccctgttttgttagcacacctagacttgctgtaactgtactcatgtcccagtatgtacgttctttctatgaaagagaaaacactaatcttaaattatatccagcaatgtttctggtatcctttaagaaaagttaagactattatttccttcccttccctgtgcagcattcaaaaatcacccctagaaaaagtgagtgttttaatgagacttcctaggaagggatgcactgtaaaacaaaagtattcttgtaactcagttttgtgaaaggtaaaaaactactatgttttaagtacactttagaaagtctcttcaaaacaaacagtcctgtatttgaactctgttcatagtttttttttgaacagtttagacaaaactgttggaaattaaaccaatttcctgcattaagctgagacaagtatataaacagccctatacagtttcatagcttttcctcccccatttatgtgtattggtgacagtgggtataaaacagcctgaaagtgtatgcatgtaccataacatttagacttaatatattgtggagtattcaataaccattatgtagaaggtagataagaattaaaagggtttaatttcctagaaagaaaatggaaaaatggtcatttttaaaaaataaagtttattagatcataatgttgtctgaatttaccacctttgtcagaagtcaactcaaagcttccaatgtagtcagtctataattccttaatcaaagtcagcaatttatggacagcttcagcatttacagttgacctttcactagccaggcaaacttcccttaaaattaaaaaaaaaaaaaaaaaaaaaaaaaaaaaaaaaaaaaaaa

SEQ ID NO: 262 - protein, 141 aa, Homo sapien
MKDNKIMNNQDAIEKAVSRGQCLYKISSYTSYPMHDFYRCHTCNTTDRNAICVNCIKKCHQGHDVEFIRHDRYVAHLLDILPNYFPPHFSNIWVSFCFRFFCDCGAGTLSNPCTLAGEPTHDTDTLYDSAPPIESNTLQHN

SEQ ID NO: 263 - DNA, 2210 bp, Homo sapien
cgcgcccctccctcctcgcggacctggcggtgccggcgcccggagtggccctttaaaaggcagcttattgtccggagggggcgggcggggggcgccgaccgcggcctgaggcccggcccctcccctctccctccctctgtccccgcgtcgctcgctggctagctcgctggctcgctcgcccgtccggcgcacgctccgcctccgtcagttggctccgctgtcgggtgcgcggcgtggagcggcagccggtctggacgcgcggccggggctgggggctgggagcgcggcgcgcaagatctccccgcgcgagagcggcccctgccaccgggcgaggcctgcgccgcgatggcagagatgggcagtaaaggggtgacggcgggaaagatcgccagcaacgtgcagaagaagctcacccgcgcgcaggagaaggttctccagaagctggggaaggcagatgagaccaaggatgagcagtttgagcagtgcgtccagaatttcaacaagcagctgacggagggcacccggctgcagaaggatctccggacctacctggcctccgtcaaagccatgcacgaggcttccaagaagctgaatgagtgtctgcaggaggtgtatgagcccgattggcccggcagggatgaggcaaacaagatcgcagagaacaacgacctgctgtggatggattaccaccagaagctggtggaccaggcgctgctgaccatggacacgtacctgggccagttccccgacatcaagtcacgcattgccaagcgggggcgcaagctggtggactacgacagtgcccggcaccactacgagtcccttcaaactgccaaaaagaaggatgaagccaaaattgccaaggccgaggaggagctcatcaaagcccagaaggtgtttgaggagatgaatgtggatctgcaggaggagctgccgtccctgtggaacagccgcgtaggtttctacgtcaacacgttccagagcatcgcgggcctggaggaaaacttccacaaggagatgagcaagctcaaccagaacctcaatgatgtgctggtcggcctggagaagcaacacgggagcaacaccttcacggtcaaggcccagcccagaaagaaaagtaaactgttttcgcggctgcgcagaaagaagaacagtgacaacgcgcctgcaaaagggaacaagagcccttcgcctccagatggctcccctgccgccacccccgagatcagagtcaaccacgagccagagccggccggcggggccacgcccggggccaccctccccaagtccccatctcagccagcagaggcctcggaggtggcgggtgggacccaacctgcggctggagcccaggagccaggggagacggcggcaagtgaagcagcctccagctctcttcctgctgtcgtggtggagaccttcccagcaactgtgaatggcaccgtggagggcggcagtggggccgggcgcttggacctgcccccaggtttcatgttcaaggtacaggcccagcacgactacacggccactgacacagacgagctgcagctcaaggctggtgatgtggtgctggtgatccccttccagaaccctgaagagcaggatgaaggctggctcatgggcgtgaaggagagcgactggaaccagcacaaggagctggagaagtgccgtggcgtcttccccgagaacttcactgagagggtcccatgacggcggggcccaggcagcctccgggcgtgtgaagaacacctcctcccgaaaaatgtgtggttcttttttttgttttgttttcgtttttcatcttttgaagagcaaagggaaatcaagaggagacccccaggcagaggggcgttctcccaaagattaggtcgttttccaaagagccgcgtcccggcaagtccggcggaattcaccagtgttcctgaagctgctgtgtcctctagttgagtttctggcgcccctgcctgtgcccgcatgtgtgcctggccgcagggcggggctgggggctgccgagccaccatgcttgcctgaagcttcggccgcgccacccgggcaagggtcctcttttcctggcagctgctgtgggtggggcccagacaccagcctagcctggctctgccccgcagacggtctgtgtgctgtttgaaaataaatcttagtgttcaaaacaaaatgaaacaaaaaaaaaatgataaaaactctcaaaaaaa

SEQ ID NO: 264 - protein, 409 aa, Homo sapien
MAEMGSKGVTAGKIASNVQKKLTRAQEKVLQKLGKADETKDEQFEQCVQNFNKQLTEGTRLQKDLRTYLASVKAMHEASKKLNECLQEVYEPDWPGRDEANKIAENNDLLWMDYHQKLVDQALLTMDTYLGQFPDIKSRIAKRGRKLVDYDSARHHYESLQTAKKKDEAKIAKAEEELIKAQKVFEEMNVDLQEELPSLWNSRVGFYVNTFQSIAGLEENFHKEMSKLNQNLNDVLVGLEKQHGSNTFTVKAQPSDNAPAKGNKSPSPPDGSPAATPEIRVNHEPEPAGGATPGATLPKSPSQSSLPAVVVETFPATVNGTVEGGSGAGRLDLPPGFMFKVQAQHDYTATDTDELQLKAGDVVLVIPFQNPEEQDEGWLMGVKESDWNQHKELEKCRGVFPENFTERVP

SEQ ID NO: 265 - DNA, 4343 bp, Homo sapien
agatttgataatgggctgcattaaaagtaaagaaaacaaaagtccagccattaaatacagacctgaaaatactccagagcctgtcagtacaagtgtgagccattatggagcagaacccactacagtgtcaccatgtccgtcatcttcagcaaagggaacagcagttaatttcagcagtctttccatgacaccatttggaggatcctcaggggtaacgccttttggaggtgcatcttcctcattttcagtggtgccaagttcatatcctgctggtttaacaggtggtgttactatatttgtggccttatatgattatgaagctagaactacagaagacctttcatttaagaagggtgaaagatttcaaataattaacaatacggaaggagattggtgggaagcaagatcaatcgctacaggaaagaatggttatatcccgagcaattatgtagcgcctgcagattccattcaggcagaagaatggtattttggcaaaatggggagaaaagatgctgaaagattacttttgaatcctggaaatcaacgaggtattttcttagtaagagagagtgaaacaactaaaggtgcttattccctttctattcgtgattgggatgagataaggggtgacaatgtgaaacactacaaaattaggaaacttgacaatggtggatactatatcacaaccagagcacaatttgatactctgcagaaattggtgaaacactacacagaacatgctgatggtttatgccacaagttgacaactgtgtgtccaactgtgaaacctcagactcaaggtctagcaaaagatgcttgggaaatccctcgagaatctttgcgactagaggttaaactaggacaaggatgtttcggcgaagtgtggatgggaacatggaatggaaccacgaaagtagcaatcaaaacactaaaaccaggtacaatgatgccagaagctttccttcaagaagctcagataatgaaaaaattaagacatgataaacttgttccactatatgctgttgtttctgaagaaccaatttacattgtcactgaatttatgtcaaaaggaagcttattagatttccttaaggaaggagatggaaagtatttgaagcttccacagctggttgatatggctgctcagattgctgatggtatggcatatattgaaagaatgaactatattcaccgagatcttcgggctgctaatattcttgtaggagaaaatcttgtgtgcaaaatagcagactttggtttagcaaggttaattgaagacaatgaatacacagcaagacaaggtgcaaaatttccaatcaaatggacagctcctgaagctgcactgtatggtcggtttacaataaagtctgatgtctggtcatttggaattctgcaaacagaactagtaacaaagggccgagtgccatatccaggtatggtgaaccgtgaagtactagaacaagtggagcgaggatacaggatgccgtgccctcagggctgtccagaatccctccatgaattgatgaatctgtgttggaagaaggaccctgatgaaagaccaacatttgaatatattcagtccttcttggaagactacttcactgctacagagccacagtaccagccaggagaaaatttataattcaagtagcctattttatatgcacaaatctgccaaaatataaagaacttgtgtagattttctacaggaatcaaaagaagaaaatcttctttactctgcatgtttttaatggtaaactggaatcccagatatggttgcacaaaaccacttttttttccccaagtattaaactctaatgtaccaatgatgaatttatcagcgtatttcagggtccaaacaaaatagagctaagatactgatgacagtgtgggtgacagcatggtaatgaaggacagtgaggctcctgcttatttataaatcatttcctttctttttttccccaaagtcagaattgctcaaagaaaattatttattgttacagataaaacttgagagataaaaagctataccataataaaatctaaaattaaggaatatcatgggaccaaataattccattccagttttttaaagtttcttgcatttattattctcaaaagttttttctaagttaaacagtcagtatgcaatcttaatatatgctttcttttgcatggacatgggccaggtttttcaaaaggaatataaacaggatctcaaacttgattaaatgttagaccacagaagtggaatttgaaagtataatgcagtacattaatattcatgttcatggaactgaaagaataagaactttttcacttcagtccttttctgaagagtttgacttagaataatgaaggtaactagaaagtgagttaatcttgtatgaggttgcattgattttttaaggcaatatataattgaaactactgtccaatcaaaggggaaatgttttgatctttagatagcatgcaaagtaagacccagcattttaaaagccctttttaaaaactagacttcgtactgtgagtattgcttatatgtccttatggggatgggtgccacaaatagaaaatatgaccagatcagggacttgaatgcacttttgctcatggtgaatatagatgaacagagaggaaaatgtatttaaaagaaatacgagaaaagaaaatgtgaaagttttacaagttagagggatggaaggtaatgtttaatgttgatgtcatggagtgacagaatggctttgctggcactcagagctcctcacttagctatattctgagactttgaagagttataaagtataactataaaactaatttttcttacacactaaatgggtatttgttcaaaataatgaagttatggcttcacattcattgcagtgggatatggtttttatgtaaaacatttttagaactccagttttcaaatcatgtttgaatctacattcacttttttttgttttcttttttgagacggagtctcgctctgccgcccaggctggagtgcagtggcgcgatctcggctcactgcaagctctgcctcccaggttcacaccattctcctgcctcagcctcccgagtagctgggactacaggtgcccaccaccacgcctggctagttttttgtatttttagtagagacgcagtttcaccgtgttagccaggatggtctcgatctcctgaccttgtgatctgcccgcctcggcctcccaaagtgctgggattacaggcgtgagccaccgcgcccagcctacattcacttctaaagtctatgtaatggtggtcattttttcccttttagaatacattaaatggttgatttggggaggaaaacttattctgaatattaacggtggtgaaaaggggacagtttttaccctaaagtgcaaaagtgaaacatacaaaataagactaatttttaagagtaactcagtaatttcaaaatacagatttgaatagcagcattagtggtttgagtgtctagcaaaggaaaaattgatgaataaaatgaaggtctggtgtatatgttttaaaatactctcatatagtcacactttaaattaagccttatattaggcccctctattttcaggatataattcttaactatcattatttacctgattttaatcatcagattcgaaattctgtgccatggcgtatatgttcaaattcaaaccatttttaaaatgtgaagatggacttcatgcaagttggcagtggttctggtactaaaaattgtggttgttttttctgtttacgtaacctgcttagtattgacactctctaccaagagggtcttcctaagaagagtgctgtcattatttcctcttatcaacaacttgtgacatgagattttttaagggctttatgtgaactatgatattgtaatttttctaagcatattcaaaagggtgacaaaattacgtttatgtactaaatctaatcaggaaagtaaggcaggaaaagttgatggtattcattaggttttaactgaatggagcagttccttatataataacaattgtatagtagggataaaacactaacttaatgtgtattcattttaaattgttctgtatttttaaattgccaagaaaaacaactttgtaaatttggagatattttccaacagcttttcgtcttcagtgtcttaatgtggaagttaacccttaccaaaaaaggaagttggcaaaaacagccttctagcacacttttttaaatgaataatggtagcctaaacttaatatttttataaagtattgtaatattgttttgtggataattgaaataaaaagttctcattgaatgcacctattaaaaaaaaaaaaaaaaaa

SEQ ID NO: 266 - protein, 543 aa, Homo sapien
MGCIKSKENKSPAIKYRPENTPEPVSTSVSHYGAEPTTVSPCPSSSAKGTAVNFSSLSMTPFGGSSGVTPFGGASSSFSVVPSSYPAGLTGGVTIFVALYDYEARTTEDLSFKKGERFQIINNTEGDWWEARSIATGKNGYIPSNYVAPADSIQAEEWYFGKMGRKDAERLLLNPGNQRGIFLVRESETTKGAYSLSIRDWDEIRGDNVKHYKIRKLDNGGYYITTRAQFDTLQKLVKHYTEHADGLCHKLTTVCPTVKPQTQGLAKDAWEIPRESLRLEVKLGQGCFGEVWMGTWNGTTKVAIKTLKPGTMMPEAFLQEAQIMKKLRHDKLVPLYAVVSEEPIYIVTEFMSKGSLLDFLKEGDGKYLKLPQLVDMAAQIADGMAYIERMNYIHRDLRAANILVGENLVCKIADFGLARLIEDNEYTARQGAKFPIKWTAPEAALYGRFTIKSDVWSFGILQTELVTKGRVPYPGMVNREVLEQVERGYRMPCPQGCPESLHELMNLCWKKDPDERPTFEYIQSFLEDYFTATEPQYQPGENL

SEQ ID NO: 267 - DNA, 4343 bp, Homo sapien; identical to SEQ ID NO: 265

SEQ ID NO: 268 - protein, 543 aa, Homo sapien; identical to SEQ ID NO: 266

SEQ ID NO: 269 - DNA, 3593 bp, Homo sapien
ctcggccccgggctgccgcgccagcccgtctccgcggcgggggaccgggctgccttggcccctcagcgctcgcgtcttttccggcagttggaacgcttcctgttgtcctcacccgtaaccgcctgttgccccctgtctcagagtccctcacgcgtcccctcccgtctttggctcgttggctgccgccgccggggcttcgccagccttcaagtcgagactactggccgaaggggcgtctgcggctctccgccgtccccagccctgcctctccctgggctctgcagccatggcaatgacaggctcaacaccttgctcatccatgagtaaccacacaaaggaaagggtgacaatgaccaaagtgacactggagaatttttatagcaaccttatcgctcaacatgaagaacgagaaatgagacaaaagaagttagaaaaggtgatggaagaagaaggcctaaaagatgaggagaaacgactccggagatcagcacatgctcggaaggaaacagagtttcttcgtttgaagagaacaagacttggattggaagattttgagtccttaaaagtaataggcagaggagcatttggtgaggtacggcttgttcagaagaaagatacgggacatgtgtatgcaatgaaaatactccgtaaagcagatatgcttgaaaaagagcaggttggccacattcgtgcggagcgtgacattctagtggaggcagacagtttgtgggttgtgaaaatgttctatagttttcaggataagctaaacctctacctaatcatggagttcctgcctggaggggacatgatgaccttgttgatgaaaaaagacactctgacagaagaggagactcagttttatatagcagaaacagtattagccatagactctattcaccaacttggattcatccacagagacatcaaaccagacaaccttcttttggacagcaagggccatgtgaaactttctgactttggtctttgcacaggactgaaaaaagcacataggacagaattttataggaatctgaaccacagcctccccagtgatttcactttccagaacatgaattccaaaaggaaagcagaaacctggaaaagaaatagacgtcagctagccttctccacagtaggcactcctgactacattgctcctgaggtgttcatgcagaccgggtacaacaagctctgtgattggtggtcgcttggggtgatcatgtatgagatgctcatcggctacccacctttctgttctgagacccctcaagagacatataagaaggtgatgaactggaaagaaactttgacttttcctccagaagttcccatctctgagaaagccaaggatctaattttgaggttctgctgtgaatgggaacatagaattggagctcctggagttgaggaaataaaaagtaactctttttttgaaggcgttgactgggaacatatcagagagagacctgctgcaatatctattgaaatcaaaagcattgatgatacctcaaacttcgatgagtttccagaatctgatattcttaagccaacagtggccacaagtaatcatcctgagactgactacaagaacaaagactgggtcttcatcaattacacgtacaagcgctttgagggcctgactgcaaggggggcaataccttcctacatgaaagcagcaaaatagtactcttgccacggaatcctatgtggagcagagttctttgtataacatcatgcttttcctctcacactcttgaagagcttccaagaagttgatggaacccaccaatatgtcatagtaaagtctcctgaaatgtggtagtaagaggattttcttccataatgcatctgaaaaactgtaaacaaagacaaccatttctactacgtcggccataaacagctatcctgctttggaagagaagcatcatgagccaatttgataggtgttttaaaaataacttgagttttcctaagttcatcagaatgaaggggaaaaacagccatcatccaacattattgagattgtcgtgtatagtcatcgaatatcagccagttcctgtaattttgtgacacgctctctgccaagcccaccaagtatttcctttatagctaaaagttccatagtactaaggaaataaagcaataaagacagtctcagcagccaggattctggctgaaggaaatgatccgccaccctgagggtggtgatggtagtttctacccatacctcagcctcaggcgagtggcttatagcctccattcatggtgcactttatttatggtactaagataaagactgtcaatccattgatttatctcctcctgtcccccatctaaaatacccatgctgcttttctgagtgttgatgggggttaccagcttgatccactgttgctcttagaaggcccagaaagtctttgggcattgccaagaaatcccggattatgtggaaaaccctcactttctcttcacggctgtaccagaaaatccctaagacagatcttgccgtggactagcaatacctgcaagtgctgccaatgggaactcaatttattcctgggaacctaacgaggagagcccaggcctaggcaggaggcctggaaccctcttggctaaggtgctgttcctgttcctgcaaggtctccagaacccctttggaaatggtgaaggaaccagcccaatagaagtacagagccagctgacaagtccttgtaaagctcactcctcagtccttggcacagccatgttttgtcttctctcttggtatttcttctctcccaactttagccattttgccttggaatcatgattacaattttttcctttgcagatgccttcctgggggatactcctccccaccctaaagggtcgcctgcaacttaggcggattgggtctctctgctgtggcgttctctcttgagagaccctctgaattttagcacaaagtgccttctgtttcacagctgccaccacctttagaggaatttcgtcagaaaaatgtggaggctccatattaatgcattattttttaaaaagttttgataactcttaaagcatcatttgcacctatgtgggaactttgcctgttgcaaagtattgtggccgagctgcagctgggagcctgctttctgccagtcttgaggttctgaagatcagctttgaaaggaaagtatgtcctagcttagccattcagaagagaaaaatggaatatcagagttacagttgtcagtgaaactactttggattttaacctcttagaggaagaaaaaaggttagggaagtgtcaactctggatgaaggtgatgtgtttgcctctcagtctttcattcatagcctgctagtgaaaaggaagtaaatgagattcttttgtgtgactttgtagtctctttgtattaccaaatagttggggtgttgactcctgtgtgttttgcaagaatgtgtggtaagcctgggtaaagagaaggaactgcggtgttgggagagtctttgtgttggggagtggcaggggatgatttgtttcaggggaaaatgcccacattttaacttttaaacttctgaataaactgtgtaaaaacaaaaaaaaaaaaaaaaaa

SEQ ID NO: 270 - protein, 465 aa, Homo sapien
MAMTGSTPCSSMSNHTKERVTMTKVTLENFYSNLIAQHEEREMRQKKLEKVMEEEGLKDEEKRLRRSAHARKETEFLRLKRTRLGLEDFESLKVIGRGAFGEVRLVQKKDTGHVYAMKILRKADMLEKEQVGHIRAERDILVEADSLWVVKMFYSFQDKLNLYLIMEFLPGGDMMTLLMKKDTLTEEETQFYIAETVLAIDSIHQLGFIHRDIKPDNLLLDSKGHVKLSDFGLCTGLKKAHRTEFYRNLNHSLPSDFTFQNMNSKRKAETWKRNRRQLAFSTVGTPDYIAPEVFMQTGYNKLCDWWSLGVIMYEMLIGYPPFCSETPQETYKKVMNWKETLTFPPEVPISEKAKDLILRFCCEWEHRIGAPGVEEIKSNSFFEGVDWEHIRERPAAISIEIKSIDDTSNFDEFPESDILKPTVATSNHPETDYKNKDWVFINYTYKRFEGLTARGAIPSYMKAAK

SEQ ID NO: 271 - DNA, 3615 bp, Homo sapien
ggactgtgtgtgtctggctgtagcagacgcgaggcggcgacgaggcgccggggacccgcgcgaggggcggccgggaggcggcggcggcggccgccagaagtagcagcaggaccggcggcggcgacggcagccctgaaatgcattttcctctccagcggccatgttaaccaggaaaccttcggccgccgctcccgccgcctacccgaccggccgaggtggggacagcgccgttcgtcagcttcaggcttccccggggctcggtgcagggcccacccggagcggagtggggactggcccgccctcccccatcgccctgccgcctctccgggccagcaacgctgccgccgcagcccacacgattggcggcagtaagcacacaatgaatgatcacctgcatgtcggcagccacgctcacggacagatccaggttcaacagttgtttgaggataacagtaacaagcggacagtgctcacgacacaaccaaatgggcttacaacagtgggcaaaacgggcttgccagtggtgccagagcggcagctggacagcattcatagacggcaggggagctccacctctctaaagtccatggaaggcatggggaaggtgaaagccacccccatgacacctgaacaagcaatgaagcaatacatgcaaaaactcacagccttcgaacaccatgagattttcagctaccctgaaatatatttcttgggtctaaatgctaagaagcgccagggcatgacaggtgggcccaacaatggtggctatgatgatgaccagggatcatatgtgcaggtgccccacgatcacgtggcttacaggtatgaggtcctcaaggtcattgggaaggggagctttgggcaggtggtcaaggcctacgatcacaaagtccaccagcacgtggccctaaagatggtgcggaatgagaagcgcttccaccggcaagcagcggaggagatccgaatcctggaacacctgcggaagcaggacaaggataacacaatgaatgtcatccatatgctggagaatttcaccttccgcaaccacatctgcatgacgtttgagctgctgagcatgaacctctatgagctcatcaagaagaataaattccagggcttcagtctgcctttggttcgcaagtttgcccactcgattctgcagtgcttggatgctttgcacaaaaacagaataattcactgtgaccttaagcccgagaacattttgttaaagcagcagggtagaagcggtattaaagtaattgattttggctccagttgttacgagcatcagcgtgtctacacgtacatccagtcgcgtttttaccgggctccagaagtgatccttggggccaggtatggcatgcccattgatatgtggagcctgggctgcattttagcagagctcctgacgggttaccccctcttgcctggggaagatgaaggggaccagctggcctgtatgattgaactgttgggcatgccctcacagaaactgctggatgcatccaaacgagccaaaaattttgtgagctccaagggttatccccgttactgcactgtcacgactctctcagatggctctgtggtcctaaacggaggccgttcccggagggggaaactgaggggcccaccggagagcagagagtgggggaacgcgctgaaggggtgtgatgatccccttttccttgacttcttaaaacagtgtttagagtgggatcctgcagtgcgcatgaccccaggccaggctttgcggcacccctggctgaggaggcggttgccaaagcctcccaccggggagaaaacgtcagtgaaaaggataactgagagcaccggtgctatcacatctatatccaagttacctccaccttctagctcagcttccaaactgaggactaatttggcgcagatgacagatgccaatgggaatattcagcagaggacagtgttgccaaaacttgttagctgagctcacgtcccctgatgctggtaacctgaaagatacgacattgctgagccttactgggttgaaaaggagtagctcagacctgtttttatttgctcaataactctactcatttgtatcttttcagcacttaattttaatgtaagaaagttgttcattttgtttttataaaatacatgaggacaatgctttaagtttttatactttcagaaactttttgtgttctaaaagtacaatgagccttactgtatttagtgtggcagaataataacatcagtggcaggccactgattacttcatgactgccacgcatttacagattggtgtcaaagacattcactatgtttttatggttcatgttatatcctccccagggtgacagccccttaaggccctccttttccctccatgctccaggtccatgcacaggtgtagcatgtcctgcttccgtttttcataaattaatctgggtgttgggggtagtgggaggagaacggtcagaatcaaagtgacattctaagaaaaactgtaccttagagattttcctctagtgctcaaacaaatacaaaataagatccccaaggtttaaactgcccagttagcattctgacattctaaaagccggcaaagcagcttttagtggataaatgggaatggaaacgtgtgtgttcctccaaattttctagtatgatcggtgagctgttttgtaaagaagcctcatattacagagttgcttttgcacctaaatttagaattgtattccatgaactgttcctcccttttctctgcttttctcctctctgttcctcttttaataccacacgtctgttgcttgcatttagtttgtcttcttccttcagctgtgtatcccagactgttaatacagaaaagagacatttcagctgtgattatgaccattgtttcatattccaattaaaaaaagaacagcagcctagctacttaaggtggggatttcatagttccaaagaagatttagcagattagagtgagttcacacttttcaggtgccactgtaaggttctctcagcctgggaaactatcaactctttctttaaaaagaaagagggttgaaaatcctctggacgaacagaagtcactttggctgttcagtaaggccaatgttaacaacacgtttagaggaggaaaagttcaacctcaagttaaatggtttgacttattcttcgtatcattagaagaaccccagagatagcattcctctattttattttactttcttttggattgcactgattgtttttgtgggaatgacactttatctggcaaagtaactgagagtttggtaaaagaatattttcttctctgaataataattattttcacagtgaaaatttcagtattttatcactaatgtatgagcaatgatctatatcaatttcaaggcacgtgaaaaaaattttttagtatgtgcaatttaatatagaaagatttctgcctgtttggacaataggttttgggtagtacagattaggataagtaagcttatatatgcacagagattattgtattacctgtaaattgatttacaagtacttaaaagcgtggtccccagtgaggccaagaaagtttccggttaagttctttaataataatcctacagtttatcttaagaa

SEQ ID NO: 272 - protein, 601 aa, Homo sapien
MLTRKPSAAAPAAYPTGRGGDSAVRQLQASPGLGAGPTRSGVGTGPPSPIALPPLRASNAAAAAHTIGGSKHTMNDHLHVGSHAHGQIQVQQLFEDNSNKRTVLTTQPNGLTTVGKTGLPVVPERQLDSIHRRQGSSTSLKSMEGMGKVKATPMTPEQAMKQYMQKLTAFEHHEIFSYPEIYFLGLNAKKRQGMTGGPNNGGYDDDQGSYVQVPHDHVAYRYEVLKVIGKGSFGQVVKAYDHKVHQHVALKMVRNEKRFHRQAAEEIRILEHLRKQDKDNTMNVIHMLENFTFRNHICMTFELLSMNLYELIKKNKFQGFSLPLVRKFAHSILQCLDALHKNRIIHCDLKPENILLKQQGRSGIKVIDFGSSCYEHQRVYTYIQSRFYRAPEVILGARYGMPIDMWSLGCILAELLTGYPLLPGEDEGDQLACMIELLGMPSQKLLDASKRAKNFVSSKGYPRYCTVTTLSDGSVVLNGGRSRRGKLRGPPESREWGNALKGCDDPLFLDFLKQCLEWDPAVRMTPGQALRHPWLRRRLPKPPTGEKTSVKRITESTGAITSISKLPPPSSSASKLRTNLAQMTDANGNIQQRTVLPKLVS

SEQ ID NO: 273 - DNA, 4099 bp, Homo sapien
cagctgccagccgaggaggcgcggcggagaggggactgcggtcagctgcgtccacttggggctgtgcggcggtcccgcgcccggcgatgttcccgggcactccctgagtagcggcagcttatcccccgcccgctagcccgccctggtccccggctcgctcgctggctggcgcggccccggccccgctctgcgtcggccccgccgcggtggaggcgcgcgagggggacgcggccggggatgagcggattgcgggtgaactcgccgcccgggggccccgcgaagccgtgagccgctgcttttctccgagtcgccgccctgcccttggatttgagatcatgtccatccacatcgtggcgctggggaacgagggggacacattccaccaggacaaccggccgtcggggcttatccgcacttacctggggagaagccctctggtctccggggacgagagcagcttgttgctgaacgcggccagcacggtcgcgcgtccggtgttcaccgagtatcaggccagtgcgtttgggaatgtcaagctggtggtccacgactgtcccgtctgggacatatttgacagtgattggtacacttctcgaaatctaattgggggcgctgacatcattgtgatcaaatacaacgttaatgacaagttttcattccatgaagtaaaggataattatattccagtgataaaaagagcattaaattcagttccagtaattattgctgctgttggtaccagacaaaatgaagagttaccttgtacatgcccactatgtacctcagacagagggagctgtgttagtacaactgaagggatccaacttgcaaaagaactaggagcaacctatcttgaactccacagccttgatgacttctacataggaaagtattttggaggagtgttggagtattttatgattcaagccttaaatcagaagacaagtgaaaaaatgaagaaaagaaaaatgagcaactcctttcatggaattagaccacctcaacttgaacaaccagaaaaaatgcctgtcttaaaggctgaagcgtcacattataactctgacttaaataacttgctgttctgctgccagtgtgtggacgtggtattttataaccccgatttaaagaaagttgtagaggcccacaagatcgttctctgcgctgtaagccatgttttcatgctgcttttcaatgtgaagagtcccactgacattcaggattccagtatcatccgaactacccaggatctttttgctataaacagagatactgcatttccaggtgctagccatgaatcttcaggcaacccaccattacgagtcattgttaaagacgccctcttctgttcttgtttatcagacatccttcgcttcatttattcaggtgcttttcagtgggaagaattggaagaagatatcaggaagaagttgaaagattctggggatgtttcaaatgtaatcgagaaagttaaatgcattttaaaaacaccaggaaagattaattgcctaaggaattgcaaaacctatcaagccagaaaacctttgtggttttataacacttccctcaagtttttccttaataagccgatgcttgccgatgttgtcttcgaaattcaaggtacgacagtgccagcccacagggccatcctggtggcccgttgtgaagtgatggcagccatgtttaatggtaattacatggaagcaaagagtgtcctgattcccgtttatggtgtttccaaagagactttcttgtcatttttagaatacctgtacacagactcctgctgcccagctggcatattccaggccatgtgtctcctgatctgtgccgagatgtaccaagtgtccagactgcagcacatctgtgagctgttcatcattacccagctgcagagcatgccaagcagggaactggcatccatgaaccttgatatagttgacctgcttaaaaaggccaagtttcaccactctgattgcctttcaacctggctacttcatttcattgctactaactacctcatcttcagtcaaaagcctgaatttcaggatctttcagtggaagaacgcagttttgttgaaaagcacagatggccgtcgaatatgtacttgaagcagcttgcggaatacaggaagtatattcactcccggaaatgtcgttgcttagtaatgtaacctggagcttttatacactacatttcttttttattattatgaagaatgggatacctccaggttccagtaaaattcttctgaccgaaaccaatgtgggtgttagaaaaattaccatatagcttaatatgtttattagttctctttggaaaaaaactaccactgtggtcttaaaagggaacaaaatataccataggctaaaactaaggctttcactctagaatgcaaagctgttttgcagctgttttcccttaaagatgtcctgttgctttagtgatatttagacccctctcagttaagaaatgcttagattaaaaaaaaaaaattacgtaggattaatacagaaatttaatcatgtctgattaattgctctattaaaataaggggcatttaaagacccagcataaccatttgtataatgagaaatctaggggaaaaccaatcagtccaacatgagattttaggaatagaaatttgccggccatttggaaagtgaaatgccacttagttctcaattgatgacagtgtttgaatcatcataaaaaaaatacctgcttttcatctggacaacccaattgagccactttatctccttttggcaatctgagtaggcggggaacctaggcagggctggctttcttagcgtgtaacttgtgtagcagcacagggcccacacttagaaggaccccacacttggttcaaggctctgctatagcggaaattcttaataatgtttgaagaagggccccatgatttcattttgtgctgagccctcaaaattatgtctgtttcgtggtgggaaatatcctatgttttcttgctcaaacacctttctctctgaaagcagaaaaaggcactgatataaagggaagagaaggaggctcaccggagggaagagaacatagtgaagattcccgcctttggggaggtctggaccacccagggcctccactgccaccttggctggcaagggagaaatgtgttgtgttgtcttagctttaaaacagtcacagttcttgctctatcatagatgaacaaatactttcttgatcattctgtaagaccaggaggttggtaagagtgactaaccagcctaactttaatacacatgtataaagatgttcacagagaaagatgctctgtagagaatttgctaccgaagttggctcaagaatttgtttttagtgttatttaccaagattaggacgtcagtggcttaaattctttgaattcttttcaaggactgcaagattatttgataaagagtagcatgaatcttgtgctctaatattacacagtaagttcaaagaaaggatgtaagtcaaagacttgttacatagagggaaaatggactgggatagaggacagactgatagtttctttctttcatatcacatgtatagagaaataattatatcagaaactcacaaacctagacatggaaaaacagattactgtctattgtcagcatcattttcatctgtaagtcactactggaatatatttttcttttaatttccagtgactttagaatacacacagtttttccgacttttcaaaaatttgattaaatggttttatagtataatattgggaccccataccgttagcccttgtatgtataccaacactgccaaagtaaaacattaggtcaggcatggtggctcaggcctgtaatcccagcattttgggaggctgaggcaagtggataacttgaggtcatgagttcgaaaccagcctggccaaaacagtgaaaccccgtctctactaaaaatacaaaattagccagatgtggtggcgcacacctgtaatcccagctactcaggaagctgaggcaggaaaatcgcttgaacctgggaggtggaagttgcagtgagccgagatcgcaccactgcactccagcctgggtgacaagagcgaaactccatctc

SEQ ID NO: 274 - protein, 611 aa, Homo sapien [sequence omitted]

SEQ ID NO: 275 - DNA, 4099 bp, Homo sapien; identical to SEQ ID NO: 273

SEQ ID NO: 276 - protein, 611 aa, Homo sapien [sequence omitted]

SEQ ID NO: 277 - DNA, 1280 bp, Homo sapien
gcggccgccgtggccaggcaacctatgggtaccaccgggttctcgcgggtcttgcgaacgaacttttccttgaaactctctggattcctgtaaacagtggggctcagcccctcaatgactggaggcttcgatggttcaaaggggacctccggaatcacagggccgggagtcgccatgtccgggccacagcagcaggagaaaatcgggactccgacctcagcctcccggtgaaggtcatgaaaggggcggggaaacgaataaattgagccttgtacgcaggcgcaaatgctcgttgcatcctgggagtcgtagtgctcagcacggtagtgctacaaaaggactacatttccccaaatgcccgcaaagccttgtgcacgccttccggaaggagtttgttacacgaggtctgagagacagaggcagcgtgtttgagctgctggtgcggtggtcagcgcgatgcccaaggccaagggcaaaacccggaggcagaagtttggttacagtgtcaaccgaaagcgtctgaaccggaatgctcgacggaaggcagcgcgcggaatcgaatgctcccacatccgacatgcctgggaccacgctaaatcggtacggcagaacctggccgagatggggttggctgtggaccccaacagggcggtgcccctccgtaagagaaaggtgaaggccatggaggtggacatagaggagaggcctaaagagcttgtacggaagccctatgtgctgaatgacctggaggcagaagccagccttccagaaaagaaaggaaatactctgtctcgggacctcattgactatgtacgctacatggtagagaaccacggggaggactataaggccatggcccgtgatgagaagaattactatcaagataccccaaaacagattcggagtaagatcaacgtctataaacgcttttacccagcagagtggcaagacttcctcgattctttgcagaagaggaagatggaggtggagtaactggtttacatcacagctgccccaggctgaggcgtcccccggaccagtgaagctggagccagggtgtaaggcaaggaggtgctgtgtggctccagaggggctggccaggtcccatggaatcagaaggttacacacacacgtgcacactccccgctctggggaaggaactgttctcagaggctccaatttatattcatctgggggttcacggaaaagccagaacctgctgttttcagggtgggtgatgtaaatatagtgtgtacataataaagcaaatatattttaaa

SEQ ID NO: 278 - protein, 178 aa, Homo sapien
MPKAKGKTRRQKFGYSVNRKRLNRNARRKAARGIECSHIRHAWDHAKSVRQNLAEMGLAVDPNRAVPLRKRKVKAMEVDIEERPKELVRKPYVLNDLEAEASLPEKKGNTLSRDLIDYVRYMVENHGEDYKAMARDEKNYYQDTPKQIRSKINVYKRFYPAEWQDFLDSLQKRKMEVE

SEQ ID NO: 279 - DNA, 5645 bp, Homo sapien
cgtccaccgtggagtctctccttgctttgggtccactgagccccacacattgttgagtgtctgattgtctccttgcccttacaggacaggaaagcgaaatctctgttcctttgtagggacctttcttttgtaggtgaaagggacagaaatatgattctggcctccttgatggtgaatacaggaacactttcagataaattacaatagagaggagtcagcttatttaaacaaactgaggttaagccagagattgcagttaacagtgaaaaaatttaaagcaagtacctggatggatgcaaagcagtgcccaggagacccaacttacgtgacagagatgatcattgtcactcattcattatgttttgagcaccagccatgtgccaggtccagaactagaagaaacttgggtgtaggtgagatcataggaacagtccctgccccagctgaacatcaggaagccagactgggagcacatgccgtggctgactaggactccagcagggacctggggttccatcagatcagtgtaaagcgatggtttcccaaatgagacctctccagagatggttcattccaccccgcaatggccaccagaaacattgtgctgaccagagggcttcactgccccaaaccccaaaatcacactccaggatgagaaacctaaaagtctatcttgatgaggcttcatagctggaaaccacccctcatggatccacaggctgcatttgatgaaaggagactccaggaagtcgagccattccaggcagacatgtagcaaaagcccgagctggggtccgccctcatgcaataaataacacctgtgcacataagagaggtgacaggcagggcatccctggggacctgggcctgtggcacgtgaagaaacacccaagagagcacgaagtcccaatgccatgaccagatatttcggtgccaggcatgcttctgggtcccagcaaaagacacacaaatccgtgtccttggggacccacagtctagtgacctagggctggccgggtcgcacgcttcttttcaagggctcgaaagcctctgcatggatgcaactttgggggaaaagtaaccctaaccctctgcttctctcatcctcccctcttctgtgtatatgtctgtctctttctctctgtgtgtgcccttccccactcccatccccattcctttttttatttattatattttggtggtgtgtggctcggtttctgttggtcccctcgtgtggcccctcccctgctgcagaactcgtccagctcggcctcctccgaagcctcggaaacctgccagtcagtgagcgagtgcagctcccccacctctgtcagctcgggctccaccatgggtgcctgggtgtccacagagaaggtgaccgcccgggtggcagccacagcggccccactctccctggtccccctgcctgctgctcagacagccctcacagccgcggcaacctggaagctcagaatcgacaccaagagtggggctcctcttggggacagagggtgggacaaggctgagagcattttctagaatgagtgcctggctgctggacaatgaccacatggttgtctcaagggagaggaaggggtatggggaatttggaggtgtgaaggctttctcccagaccaggtgttgcgtgcctgtccatcctcctccctcccttcccgagccacccaccagaccgttggatgagccatgtcactgtgtcagaggctgtgtgcttttccgctttttagtttgcacccccacccccctgcccttgattgagaatgtgctcctgagcaatgcgacgattttggaaacctagaatgaacagattcatttgaagatgctttggaatttttaaatttgcataatgaaatgagcaaatcactatcaccattaaatgaggcttcattagttacattatcaaaaaccattgacaaggccacaaattgagggcactgatcaatttccaaacttctaaaacgtaggtcaaacatagatgcttatttgctgtcaaactcatgtgcattctttgcaccccggctcttttctcttgcatcacagatcatccgtgagcagcagagccccaatgtttgttttatttataaatattcaggtttcccctcccttgaatgtcaatgccattttgtatctccgcactcatcctgttatattaattttttttcctttcccccccctttttttgtttgtttccagttgtctaacgggttttctcactatagtttatcaagtgagtcccacgtggggcccacgggtgcaggccttttccctcattgcctgcctgcctcccgcctgctccctcgggtcacctctgtccaccttccagactacgctcattattacaccattgggcccggcatgttcccgtcatctcagatccctagctggaaggactgggctaagcctgggccctatgaccagcctctggtgaacaccctgcagcgccgcaaagagaagcgagaaccggaccccaacgggggaggacccactaccgccagcggcccacctgcagcagctgaggaggctcagagaccacggagcatgactgtatcggctgccaccaggcctggtgaggagatggaggcttgtgaggagctggccctggccctgtctcggggcctgcagctggacacccagaggagcagccgggactcgcttcagtgctccagcggctacagcacccagacaaccaccccctgctgctctgaggacaccatcccttcccaagtttcagattatgattatttctctgtaagtggtgaccaggaggcagatcagcaggagttcgacaagtcctccaccattccaagaaacagcgacatcagccagtcctaccgacggatgttccaagccaagcgtccagcctcaactgctggcctccccaccaccctgggacctgctatggtcactccaggggttgcaactatccgacggaccccttccaccaagccttctgtccgccggggaaccattggagctggtcccatccccatcaagacacccgtgatccctgtcaagaccccaaccgtcccagacctcccaggggtgttgccagcccctccagatgggccagaagagcggggggagcacagccctgagtcgccatctgtgggtgagggcccccaaggtgtcaccagcatgccctcctcaatgtggagcggccaagcttccgttaaccctccacttccaggcccgaagcccagtatccctgaggagcacagacaggcaattccagaaagtgaagctgaagaccaggaacgggaacccccaagtgccactgtctccccaggccagattccagagagtgaccctgcagacctgagcccaagggatactccacaaggagaagacatgctgaacgccatccgaaggggcgtgaaactgaagaagaccacgacaaacgatcgctcagcccctcgcttttcttaggttcacaagaaatgcgccggtggggaatgaactgtttcattaataaaacctaatttgtcttgatccattccactctataataaaacaaaagattttgtaggcaactcggaatatagctcttttgaaagtactcgacacctttagataagaattaaaaccaacctatgtaactgacataatcttgatcttttaatttgtaaatattgacaattttctttctgcacattttaatcttagtttcccttttgatttttctgaaggtgccaaattccatttaacttttttacaagtctttgtaaaattttaaatgcataaagggggttggggcaggggaaccacgaagtagttaattttagaaaaggatttactatacttcactcttctttttttttccccacaagcttttgtagatgcattgtagtagtctagcttagaagcaaatgcaagttattttaatgtacaaactaaatgggtaagaggtaaaatcttcatttaaatatactatgttctggatgaaaagagcaggagtaacaattgatgagcaatattcagagtgaagtaaatctggaaatggtagactgtgttgggattggggggagggccatgggaggggtacatcgtcaacatagccgatcctgttacatttaagagtagcctcgtaggttgaatttcttctggtagcttcatggtaaatgcatccgaataagccatactggattgcagtgtttgtttctgtagggtgtttaaggacttgacttcctttctcccatgattcctctggactgcacacagcacccacaaccagccccatgcatgctgctgcctctgggcagtcgtagaatctcccacttcagtttctcgttgattgtactcacctttatggaatccaaatacatccaaaagggtaaggcagttttaaaaatgtgaaaacatttaaaaatgataatagcagggaattcttagattatagtaaatgccttttacttaactgtgcccagcaggctgggtgcgttaaaaagcccaagtattttgaaaaaactcgaacagatttgacaagggtagccagcttggagtctagcaacttgccaatgtgtttaccaatctgggggcttgtttttcttttcttctttcaaataaatggcagttaactggctttacagtaaacattgaagagaggaggatttgtttattgtcactgggaatctgaccactatactgtcctttttttgtattctgggtaatgttttttggaaaagatttgtcttttctaagtggaagttaaatttgttatactgcccatcccctaaagccaacagagatttgtagatttaaagggatcacatttgaagacaatagtgtttaagaaagcaagcaagtcccttagcagtcaggtcataacagggcacatttctgaccgaaccctctcaaggcagaggaggagtttggtgggtttcatacaccctgcagattcctgttggctctaaccctcaattacctaatcttatgctttaacacataactgcattggatgtgagagtaacgtaccgtatggtcattgttctatatattaacattgaacactgctgcgattgctcaaggacattttatgttacggctttaaagcaaaggcatgattattagaaactatttaagcttttttctttgaaaaacaagcttcttttacagaatataaacaacagtagtgcctgtggtttagcccaccaatcttgatgactaaaagtagctgatgcattgtgcatatgatgcttgagatggtttttgcaaaagcagaaatcgctgcaaggtaatcacaatagataaaagtggtattttaaacctttgaaataaatggatgtaactgtaccttggtacagcttttcacttgtttagtttttaaacgttagtataatctgaataaataaaatgttgccaaattcaatgtagaaagaatgtgacaacacaccttgggtagttctgcttgtgtttttgcatattgtaaaagcagtgtcacagctaaaaagaaagaaatcgtttctaacagtaaattattgtgctttagttgctagtttgtactgagagttgacctctccctgtgcagttttttgttctaaacttgtataaataacaattgtgtaatgtgtctccctcctacattgtaacaattgcttcagcctacgttataaataaagaaccactagatt

SEQ ID NO: 280 - protein, 356 aa, Homo sapien
MFPSSQIPSWKDWAKPGPYDQPLVNTLQRRKEKREPDPNGGGPTTASGPPAAAEEAQRPRSMTVSAATRPGEEMEACEELALALSRGLQLDTQRSSRDSLQCSSGYSTQTTTPCCSEDTIPSQVSDYDYFSVSGDQEADQQEFDKSSTIPRNSDISQSYRRMFQAKRPASTAGLPTTLGPAMVTPGVATIRRTPSTKPSVRRGTIGAGPIPIKTPVIPVKTPTVPDLPGVLPAPPDGPEERGEHSPESPSVGEGPQGVTSMPSSMWSGQASVNPPLPGPKPSIPEEHRQAIPESEAEDQEREPPSATVSPGQIPESDPADLSPRDTPQGEDMLNAIRRGVKLKKTTTNDRSAPRFS

SEQ ID NO: 281 - DNA, 1568 bp, Homo sapien
cgtccttcctcagccgcgggtgatcgtagctcggaaatggcgggatttggtgctatggagaaatttttggtagaatataagagtgcagtggagaagaaactggcagagtacaaatgtaacaccaacacagcaattgaactaaaattagttcgttttcctgaagatcttgaaaatgacattagaactttctttcctgagtatacccatcaactctttggggatgatgaaactgcttttggttacaagggtctaaagatcctgttatactatattgctggtagcctgtcaacaatgttccgtgttgaatatgcatctaaagttgatgagaactttgactgtgtagaggcagatgatgttgagggcaaaattagacaaatcattccacctggattttgcacaaacacgaatgatttcctttctttactggaaaaggaagttgatttcaagccattcggaaccttacttcatacctactcagttctcagtccaacaggaggagaaaactttacctttcagatatataaggctgacatgacatgtagaggctttcgagaatatcatgaaaggcttcagacctttttgatgtggtttattgaaactgctagctttattgacgtggatgatgaaagatggcactactttctagtatttgagaagtataataaggatggagctacgctctttgcgaccgtaggctacatgacagtctataattactatgtgtacccagacaaaacccggccacgtgtaagtcagatgctgattttgactccatttcaaggtcaaggccatggtgctcaacttcttgaaacagttcatagatactacactgaatttcctacagttcttgatattacagcggaagatccatccaaaagctatgtgaaattacgagactttgtgcttgtgaagctttgtcaagatttgccctgtttttcccgggaaaaattaatgcaaggattcaatgaagatatggcgatagaggcacaacagaagttcaaaataaataagcaacacgctagaagggtttatgaaattcttcgactactggtaactgacatgagtgatgccgaacaatacagaagctacagactggatattaaaagaagactaattagcccatataagaaaaagcagagagatcttgctaagatgagaaaatgtctcagaccagaagaactgacaaaccagatgaaccaaatagaaataagcatgcaacatgaacagctggaagagagttttcaggaactagtggaagattaccggcgtgttattgaacgacttgctcaagagtaaagattatactgctctgtacaggaagcttgcaaattttctgtacaatgtgctgtgaaaaatctgatgactttaattttaaaatcttgtgacattttgcttatactaaaagttatctatctttagttgaatattttcttttggagagattgtatattttaaaatactgtttagagtttatgagcatatattgcatttaaagaaagataaagcttctgaaatactactgcaattgcttcccttcttaaacagtataataaatgcttagttgtgat

SEQ ID NO: 282 - protein, 419 aa, Homo sapien
MAGFGAMEKFLVEYKSAVEKKLAEYKCNTNTAIELKLVRFPEDLENDIRTFFPEYTHQLFGDDETAFGYKGLKILLYYIAGSLSTMFRVEYASKVDENFDCVEADDVEGKIRQIIPPGFCTNTNDFLSLLEKEVDFKPFGTLLHTYSVLSPTGGENFTFQIYKADMTCRGFREYHERLQTFLMWFIETASFIDVDDERWHYFLVFEKYNKDGATLFATVGYMTVYNYYVYPDKTRPRVSQMLILTPFQGQGHGAQLLETVHRYYTEFPTVLDITAEDPSKSYVKLRDFVLVKLCQDLPCFSREKLMQGFNEDMAIEAQQKFKINKQHARRVYEILRLLVTDMSDAEQYRSYRLDIKRRLISPYKKKQRDLAKMRKCLRPEELTNQMNQIEISMQHEQLEESFQELVEDYRRVIERLAQE

SEQ ID NO: 283 - DNA, 3745 bp, Homo sapien
gaattcggcacgaggccattgaatcccagtcctaacagaagtactgcgaatcttgtggcctcattctgaacaaaagggattagagaagaaaaatctcttgatataaggcttgaaagcaagggcaggcaatcttggttgtgaatattttctgatttttccagaaatcaagcagaagattgagctgctgatgtcagttaactctgagaagtcgtcctcttcagaaaggccggagcctcaacagaaagctcctttagttcctcctcctccaccgccaccaccaccaccaccgccacctttgccagaccccacacccccggagccagaggaggagatcctgggatcagatgatgaggagcaagaggaccctgcggactactgcaaaggtggatatcatccagtgaaaattggagacctcttcaatggccggtatcatgttattagaaagcttggatgggggcacttctctactgtctggctgtgctgggatatgcaggggaaaagatttgttgcaatgaaagttgtaaaaagtgcccagcattatacggagacagccttggatgaaataaaattgctcaaatgtgttcgagaaagtgatcccagtgacccaaacaaagacatggtggtccagctcattgacgacttcaagatttcaggcatgaatgggatacatgtctgcatggtcttcgaagtacttggccaccatctcctcaagtggatcatcaaatccaactatcaaggcctcccagtacgttgtgtgaagagtatcattcgacaggtccttcaagggttagattacttacacagtaagtgcaagatcattcatactgacataaagccggaaaatatcttgatgtgtgtggatgatgcatatgtgagaagaatggcagctgagcctgagtggcagaaagcaggtgctcctcctccttcagggtctgcagtgagtacggctccacagcagaaacctataggaaaaatatctaaaaacaaaaagaaaaaactgaaaaagaaacagaagaggcaggctgagttattggagaagcgcctgcaggagatagaagaattggagcgagaagctgaaaggaaaataatagaagaaaacatcacctcagctgcaccttccaatgaccaggatggcgaatactgcccagaggtgaaactaaaaacaacaggattagaggaggcggctgaggcagagactgcaaaggacaatggtgaagctgaggaccaggaagagaaagaagatgctgagaaagaaaacattgaaaaagatgaagatgatgtagatcaggaacttgcgaacatagaccctacgtggatagaatcacctaaaaccaatggccatattgagaatggcccattctcactggagcagcaactggacgatgaagatgatgatgaagaagactgcccaaatcctgaggaatataatcttgatgagccaaatgcagaaagtgattacacatatagcagctcctatgaacaattcaatggtgaattgccaaatggacgacataaaattcccgagtcacagttcccagagttttccacctcgttgttctctggatccttagaacctgtggcctgcggctctgtgctttctgagggatcaccacttactgagcaagaggagagcagtccatcccatgacagaagcagaacggtttcagcctccagtactggggatttgccaaaagcaaaaacccgggcagctgacttgttggtgaatcccctggatccgcggaatcgagataaaattagagtaaaaattgctgacctgggaaatgcttgttgggtgcataaacacttcacggaagacatccagacgcgtcagtaccgctccatagaggttttaataggagcggggtacagcacccctgcggacatctggagcacggcgtgtatggcatttgagctggcaacgggagattatttgtttgaaccacattctggggaagactattccagagacgaagaccacatagcccacatcatagagctgctaggcagtattccaaggcactttgctctatctggaaaatattctcgggaattcttcaatcgcagaggagaactgcgacacatcaccaagctgaagccctggagcctctttgatgtacttgtggaaaagtatggctggccccatgaagatgctgcacagtttacagatttcctgatcccgatgttagaaatggttccagaaaaacgagcctcagctggcgaatgtcggcatccttggttgaattcttagcaaattctaccaatattgcattctgagctagcaaatgttcccagtacattggacctaaacggtgactctcattctttaacaggattacaagtgagctggcttcatcctcagacctttattttgctttgaggtactgttgtttgacattttgctttttgtgcactgtgatcctggggaagggtagtcttttgtcttcagctaagtagtttactgaccattttcttctggaaacaataacatgtctctaagcattgtttcttgtgttgtgtgacattcaaatgtcatttttttgaatgaaaaatactttcccctttgtgttttggcaggttttgtaactatttatgaagaaatattttagctgagtactatataatttacaatcttaagaaattatcaagttggaaccaagaaatagcaaggaaatgtacaattttatcttctggcaaagggacatcattcctgtattatagtgtatgtaaatgcaccctgtaaatgttactttccattaaatatgggagggggactcaaatttcagaaaagctaccaagtcttgagtgctttgtagcctatgttgcatgtagcggactttaactgctccaaggagttgtgcaaacttttcattccataacagtcttttcacattggattttaaacaaagtggctctgggttataagatgtcattctctatatggcactttaaaggaagaaaagatatgtttctcattctaaaatatgcattataatttagcagtcccatttgtgattttgcatatttttaaaagtacttttaaagaagagcaatttccctttaaaaatgtgatggctcagtaccatgtcatgttgcctcctctgggcgctgtaagttaagctctacatagattaaattggagaaacgtgttaattgtgtggaatgaaaaaatacatatatttttggaaaagcatgatcatgcttgtctagaacacaaggtatggtatatacaatttgcagtgcagtgggcagaatacttctcacagctcaaagataacagtgatcacattcattccataggtagctttacgtgtggctacaacaaattttactagctttttcattgtctttccatgaaacgaagttgagaaaatgattttccctttgcaggttgcacacagttttgtttatgcatttccttaaaattaattgtagactccaggatacaaaccatagtaggcaatacaatttagaatgtaatatatagaggtatattagcctctttagaagtcagtggattgaatgtctttttattttaaattttacattcattaaggtgcctcgtttttgactttgtccattaacatttatccatatgcctttgcaataactagattgtgaaaagctaacaagtgttgtaacaataatccattgtttgaggtgcttgcagttgtcttaaaaattaaagtgttttggtttttttttttccagaaaaaaaaaaaaaaaaaaaaaaaaaaaaaattcctgc

SEQ ID NO: 284 - protein, 686 aa, Homo sapien
MSVNSEKSSSSERPEPQQKAPLVPPPPPPPPPPPPPLPDPTPPEPEEEILGSDDEEQEDPADYCKGGYHPVKIGDLFNGRYHVIRKLGWGHFSTVWLCWDMQGKRFVAMKVVKSAQHYTETALDEIKLLKCVRESDPSDPNKDMVVQLIDDFKISGMNGIHVCMVFEVLGHHLLKWIIKSNYQGLPVRCVKSIIRQVLQGLDYLHSKCKIIHTDIKPENILMCVDDAYVRRMAAEPEWQKAGAPPPSGSAVSTAPQQKPIGKISKNKKKKLKKKQKRQAELLEKRLQEIEELEREAERKIIEENITSAAPSNDQDGEYCPEVKLKTTGLEEAAEAETAKDNGEAEDQEEKEDAEKENIEKDEDDVDQELANIDPTWIESPKTNGHIENGPFSLEQQLDDEDDDEEDCPNPEEYNLDEPNAESDYTYSSSYEQFNGELPNGRHKIPESQFPEFSTSLFSGSLEPVACGSVLSEGSPLTEQEESSPSHDRSRTVSASSTGDLPKAKTRAADLLVNPLDPRNRDKIRVKIADLGNACWVHKHFTEDIQTRQYRSIEVLIGAGYSTPADIWSTACMAFELATGDYLFEPHSGEDYSRDEDHIAHIIELLGSIPRHFALSGKYSREFFNRRGELRHITKLKPWSLFDVLVEKYGWPHEDAAQFTDFLIPMLEMVPEKRASAGECRHPWLNS

SEQ ID NO: 285 - DNA, 3015 bp, Homo sapien
ccggtgcgcccggcggagcgcgcgtgcgtggccagcgcgctccccgcttctgcttggctttccggcttaattttcctcggcgggattaaagttggaaattgaccggagaattgagttgccggggaacagagccccggccgccgccagagcgatgttcccgcagagccggcacccgacgccgcaccaggctgcaggccagcccttcaagttcactatcccggagtccctggaccggattaaagaggaattccagttcctgcaggcgcagtatcacagccttaaattggaatgtgagaaactggcaagtgaaaagacagaaatgcagaggcactatgtgatgtattatgaaatgtcatatggattaaacattgaaatgcacaaacagactgaaatcgccaagagattgaatacgatttgtgcacaagtcatcccatttctgtctcaggaacatcaacaacaggtggcccaggctgttgaacgtgccaaacaggtgaccatggcagagttgaatgccatcatcgggcagcagcagttgcaagctcagcatctttctcatggccacggacccccagttccccttacgcctcacccttcgggacttcagcctcctggaatcccgcccctcgggggcagtgccggccttcttgcgctgtccagtgctctgagtgggcagtctcacttggcaataaaagatgacaagaagcaccacgatgcagagcaccacagagacagagagccgggcacaagtaattccctcctggtcccagacagtctaagaggcacagataaacgcagaaatggacctgaattttccaatgacatcaagaaaaggaaggtggatgataaggactccagccactatgacagtgatggtgacaaaagcgatgacaacttagttgtggatgtgtctaatgaggacccttcttctccgcgagcaagccctgcccactcgccccgggaaaatggaatcgacaaaaatcgcctgctaaagaaggatgcttctagcagtccagcttccacggcctcctcggcaagttccacttctttgaaatccaaagaaatgagcttgcatgaaaaagccagcacgcctgttctgaaatccagcacaccaacgcctcggagcgacatgccaacgccgggcaccagcgccactccaggcctccgtccaggtctcggcaagcctccagccatagaccccctcgttaaccaagcggcagctggcttgaggacacccctggcagtgcccggcccatatcctgctccttttgggatggtcccccacgctggcatgaacggcgagctgaccagcccaggcgctgcctacgccagtttacacaacatgtcgccccagatgagcgccgcagccgccgcggccgccgtggtggcctacgggcgctcccccatggtggggtttgatcctccccctcacatgagagtacctaccattcctccaaacctggcaggaatccctggggggaaacctgcatactccttccacgttactgcagacggtcagatgcagcctgtcccttttccccccgacgccctcatcggacccggaatcccccggcatgctcgccagatcaacaccctcaaccacggggaggtggtgtgcgctgtgaccatcagcaaccccacgagacacgtgtacacaggcgggaagggctgcgtcaaggtctgggacatcagccaccctggcaataagagccctgtctcccagctcgactgtctgaacagagacaattatatccgttcctgtaaattgctacccgatggctgcactctcatagtgggaggggaagccagtactttgtccatttgggacctggcggctccaaccccgcgcatcaaggcggagctgacgtcctcggcccccgcctgctacgccctggccatcagccccgattccaaggtctgcttctcatgctgcagcgacggcaacatcgctgtgtgggatctgcacaaccagacactagtgaggcaattccagggccacacagacggagccagctgtattgacatttctaatgatggcaccaagctctggacgggtggtttggacaacacagtcaggtcctgggacctgcgcgaggggcggcagctgcagcagcacgacttcacctcccagatcttctccctggggtactgccccaccggggagtggctggcagtgggcatggagagcagcaatgtggaggtgctgcacgtgaacaagcctgacaagtaccagctgcacctgcatgagagctgcgtgctgtccctgaaatttgcttactgtggtaaatggtttgtgagtactggaaaagataacctcctcaatgcttggcggaccccctatggagccagcatattccagtccaaagagtcctcgtcagtgcttagctgtgacatctctgtggatgataagtacatagtcactggctcgggggacaagaaggctacagtctatgaagtcatctactgaaaacattatgtggtttaacgtttatagttgaattgggccaaaatgtttcgaatttatagaaatagaaaagttgtaactttaaaagagaaaaaaaattacaaacacctgtttccaaaccttgacagaaaactactttgagtctacaaagaggaggcgacaagtccatcagcagaaagtcacctgtctacatagaccaaatggagcaccaaggccaagcggacagaggggccatgggttgtaggattgaggaacggaatctgccgactcacatgacagcccattctttctttctgggtgatctggggatcacgccttgcccaagtgtgagattacctttctgttccttgcagttcacctcactttccgtcctttgtagagcagtggtgtctccaatgaacttgtttcctggttttgcatcttgtgaaatgtttttttgtatttttgttgaaggttaaacatttgtataaattgtaaatatatttggtttattacagtaaaggctttagtaccaataaaaaaaaaaaaaaaaaaaaaaaaaaaaaaaaaaaaaa

SEQ ID NO: 286 - protein, 770 aa, Homo sapien
MFPQSRHPTPHQAAGQPFKFTIPESLDRIKEEFQFLQAQYHSLKLECEKLASEKTEMQRHYVMYYEMSYGLNIEMHKQTEIAKRLNTICAQVIPFLSQEHQQQVAQAVERAKQVTMAELNAIIGQQQLQAQHLSHGHGPPVPLTPHPSGLQPPGIPPLGGSAGLLALSSALSGQSHLAIKDDKKHHDAEHHRDREPGTSNSLLVPDSLRGTDKRRNGPEFSNDIKKRKVDDKDSSHYDSDGDKSDDNLVVDVSNEDPSSPRASPAHSPRENGIDKNRLLKKDASSSPASTASSASSTSLKSKEMSLHEKASTPVLKSSTPTPRSDMPTPGTSATPGLRPGLGKPPAIDPLVNQAAAGLRTPLAVPGPYPAPFGMVPHAGMNGELTSPGAAYASLHNMSPQMSAAAAAAAVVAYGRSPMVGFDPPPHMRVPTIPPNLAGIPGGKPAYSFHVTADGQMQPVPFPPDALIGPGIPRHARQINTLNHGEVVCAVTISNPTRHVYTGGKGCVKVWDISHPGNKSPVSQLDCLNRDNYIRSCKLLPDGCTLIVGGEASTLSIWDLAAPTPRIKAELTSSAPACYALAISPDSKVCFSCCSDGNIAVWDLHNQTLVRQFQGHTDGASCIDISNDGTKLWTGGLDNTVRSWDLREGRQLQQHDFTSQIFSLGYCPTGEWLAVGMESSNVEVLHVNKPDKYQLHLHESCVLSLKFAYCGKWFVSTGKDNLLNAWRTPYGASIFQSKESSSVLSCDISVDDKYIVTGSGDKKATVYEVIY

SEQ ID NO: 287 - DNA, 3292 bp, Homo sapien
ggcacgaggaggagaagagcaaagaaaagcagtccgtctggatttgtttgcccaggactggcgccgcgcacgcggatcgccgaggggagtgcggtcggagtcaccgcgcccccgcctccccgcccgggcagctgaggccgggggttggagcgctgcccccgcgcacagtccccgagcgcccgacgtctccgcgcaggttcttgaagcagctgggcctggggcgcccactaatgtggccctgagggccggagcccgcaccgacgggagcgggagccggagcagctgcgggcgccgagtggccggtgcgcccggcggagcgcgcgtgcgtggccagcgcgctccccgcttctgcttggctttccggcttaattttcctcggcgggattaaagttggaaattgaccggagaattgagttgccggggaacagagccccggccgccgccagagcgatgttcccgcagagccggcacccgacgccgcaccaggctgcaggccagcccttcaagttcactatcccggagtccctggaccggattaaagaggaattccagttcctgcaggcgcagtatcacagccttaaattggaatgtgagaaactggcaagtgaaaagacagaaatgcagaggcactatgtgatgtattatgaaatgtcatatggattaaacattgaaatgcacaaacagactgaaatcgccaagagattgaatacgatttgtgcacaagtcatcccatttctgtctcaggaacatcaacaacaggtggcccaggctgttgaacgtgccaaacaggtgaccatggcagagttgaatgccatcatcgggcagcagcagttgcaagctcagcatctttctcatggccacggacccccagttccccttacgcctcacccttcgggacttcagcctcctggaatcccgcccctcgggggcagtgccggccttcttgcgctgtctagtgctctgagtgggcagtctcacttggcaataaaagatgacaagaagcaccacgatgcagagcaccacagagacagagagccgggcacaagtaattccctcctggtcccagacagtctaagaggcacagataaacgcagaaatggacctgaattttccaatgacatcaagaaaaggaaggtggatgataaggactccagccactatgacagtgatggtgacaaaagcgatgacaacttagttgtggatgtgtctaatgaggacccttcttctccgcgagcaagccctgcccactcgccccgggaaaatggaatcgacaaaaatcgcctgctaaagaaggatgcttctagcagtccagcttccacggcctcctcggcaagttccacttctttgaaatccaaagaaatgagcttgcatgaaaaagccagcacgcctgttctgaaatccagcacaccaacgcctcggagcgacatgccaacgccgggcaccagcgccactccaggcctccgtccaggtctcggcaagcctccagccatagaccccctcgttaaccaagcggcagctggcttgaggacacccctggcagtgcccggcccatatcctgctccttttgggatggtcccccacgctggcatgaacggcgagctgaccagcccaggcgctgcctacgccagtttacacaacatgtcgccccagatgagcgccgcagccgccgcggccgccgtggtggcctacgggcgctcccccatggtggggtttgatcctccccctcacatgagagtacctaccattcctccaaacctggcaggaatccctggggggaaacctgcatactccttccacgttactgcagacggtcagatgcagcctgtcccttttccccccgacgccctcatcggacccggaatcccccggcatgctcgccagatcaacaccctcaaccacggggaggtggtgtgcgctgtgaccatcagcaaccccacgagacacgtgtacacaggcgggaagggctgcgtcaaggtctgggacatcagccaccctggcaataagagccctgtctcccagctcgactgtctgaacagagacaattatatccgttcctgtaaattgctacccgatggctgcactctcatagtgggaggggaagccagtactttgtccatttgggacctggcggctccaaccccgcgcatcaaggcggagctgacgtcctcggcccccgcctgctacgccctggccatcagccccgattccaaggtctgcttctcatgctgcagcgacggcaacatcgctgtgtgggatctgcacaaccagacactagtgaggcaattccagggccacacagacggagccagctgtattgacatttctaatgatggcaccaagctctggacgggtggtttggacaacacagtcaggtcctgggacctgcgcgaggggcggcagctgcagcagcacgacttcacctcccagatcttctccctggggtactgccccaccggggagtggctggcagtgggcatggagagcagcaatgtggaggtgctgcacgtgaacaagcctgacaagtaccagctgcacctgcatgagagctgcgtgctgtccctgaaatttgcttactgtggtaaatggtttgtgagtactggaaaagataacctcctcaatgcttggcggaccccctatggagccagcatattccagtccaaagagtcctcgtcagtgcttagctgtgacatctctgtggatgataagtacatagtcactggctcgggggacaagaaggctacagtctatgaagtcatctactgaaaacattatgtggtttaacgtttatagttgaattgggccaaaatgtttcgaatttatagaaatagaaaagttgtaactttaaaagagaaaaaaaattacaaacacctgtttccaaaccttgacagaaaactactttgagtctacaaagaggaggcgacaagtccatcagcagaaagtcacctgtctacatagaccaaatggagcaccaaggccaagcggacagaggggccatgggttgtaggattgaggaacggaatctgccgactcacatgacagcccattctttctttctgggtgatctggggatcacgccttgcccaagtgtgagattacctttctgttccttgcagttcacctcactttccgtcctttgtagagcagtggtgtctccaatgaacttgtttcctggttttgcatcttgtgaaatgtttttttgtatttttgttgaaggttaaacatttgtataaattgtaaatatatttggtttattacagtaaaggctttagtaccaataaaaaaaaaaaaaaaa

SEQ ID NO: 288 - protein, 770 aa, Homo sapien; identical to SEQ ID NO: 286

SEQ ID NO: 289 - DNA, 10660 bp, Homo sapien
ctactacagtggcggacgtacaggacctgtttcactgcagggggatccaaaacaagccccgtggagcaacagccagagcaacagcagctgcaagacattgtttctctccctctgcccccccttccccacgcaaccccagatccatttacactttacagttttacctcacaaaaactactacaagcaccaagctccctgatggaaaggagcatcgtgcatcaagtcaccagggtggtccattcaagctgcagatttgtttgtcatccttgtacagcaatctcctcctccactgccactacagggaagtgcatcacatgtcagcatactggagcatagtgaaagagtctattttgaagcttcaaacttagtgctgctgcagaccaggaacaagagagaaagagtggatttcagcctgcacggatggtcttgaaacacaaatggtttttggtctaggcgttttacactgagattctccactgccaccctttctactcaagcaaaatcttcgtgaaaagatctgctgcaaggaactgatagcttatggttctccattgtgatgaaagcacatggtacagttttccaaagaaattagaccattttcttcgtgagaaagaaatcgacgtgctgttttcatagggtatttctcacttctctgtgaaaggaagaaagaacacgcctgagcccaagagccctcaggagccctccagagcctgtgggaagtctccatggtgaagtataggctgaggctacctgtgaacagtacgcagtgaatgttcatccagagctgctgttggcggattgtacccacggggagatgattcctcatgaagagcctggatcccctacagaaatcaaatgtgactttccgtttatcagactaaaatcagagccatccagacagtgaaacagtcaccgtggaggggggacggcgaaaaatgaaatccaaccaagagcggagcaacgaatgcctgcctcccaagaagcgcgagatccccgccaccagccggtcctccgaggagaaggcccctaccctgcccagcgacaaccaccgggtggagggcacagcatggctcccgggcaaccctggtggccggggccacgggggcgggaggcatgggccggcagggacctcggtggagcttggtttacaacagggaataggtttacacaaagcattgtccacagggctggactactccccgcccagcgctcccaggtctgtccccgtggccaccacgctgcctgccgcgtacgccaccccgcagccagggaccccggtgtcccccgtgcagtacgctcacctgccgcacaccttccagttcattgggtcctcccaatacagtggaacctatgccagcttcatcccatcacagctgatccccccaaccgccaaccccgtcaccagtgcagtggcctcggccgcaggggccaccactccatcccagcgctcccagctggaggcctattccactctgctggccaacatgggcagtctgagccagacgccgggacacaaggctgagcagcagcagcagcagcagcagcagcagcagcagcagcatcagcatcagcagcagcagcagcagcagcagcagcagcagcagcagcagcagcacctcagcagggctccggggctcatcaccccggggtcccccccaccagcccagcagaaccagtacgtccacatttccagttctccgcagaacaccggccgcaccgcctctcctccggccatccccgtccacctccacccccaccagacgatgatcccacacacgctcaccctggggcccccctcccaggtcgtcatgcaatacgccgactccggcagccactttgtccctcgggaggccaccaagaaagctgagagcagccggctgcagcaggccatccaggccaaggaggtcctgaacggtgagatggagaagagccggcggtacggggccccgtcctcagccgacctgggcctgggcaaggcaggcggcaagtcggttcctcacccgtacgagtccaggcacgtggtggtccacccgagcccctcagactacagcagtcgtgatccttcgggggtccgggcctctgtgatggtcctgcccaacagcaacacgcccgcagctgacctggaggtgcaacaggccactcatcgtgaagcctccccttctaccctcaacgacaaaagtggcctgcatttagggaagcctggccaccggtcctacgcgctctcaccccacacggtcattcagaccacacacagtgcttcagagccactcccggtgggactgccagccacggccttctacgcagggactcaaccccctgtcatcggctacctgagcggccagcagcaagcaatcacctacgccggcagcctgccccagcacctggtgatccccggcacacagcccctgctcatcccggtcggcagcactgacatggaagcgtcgggggcagccccggccatagtcacgtcatccccccagtttgctgcagtgcctcacacgttcgtcaccaccgcccttcccaagagcgagaacttcaaccctgaggccctggtcacccaggccgcctacccagccatggtgcaggcccagatccacctgcctgtggtgcagtccgtggcctccccggcggcggctccccctacgctgcctccctacttcatgaaaggctccatcatccagttggccaacggggagctaaagaaggtggaagacttaaaaacagaagatttcatccagagtgcagagataagcaacgacctgaagatcgactccagcaccgtagagaggattgaagacagccatagcccgggcgtggccgtgatacagttcgccgtcggggagcaccgagcccaggtcagcgttgaagttttggtagagtatcctttttttgtgtttggacagggctggtcatcctgctgtccggagagaaccagccagctctttgatttgccgtgttccaaactctcagttggggatgtctgcatctcgcttaccctcaagaacctgaagaacggctctgttaaaaagggccagcccgtggatcccgccagcgtcctgctgaagcactcaaaggccgacggcctggcgggcagcagacacaggtatgccgagcaggaaaacggaatcaaccaggggagtgcccagatgctctctgagaatggcgaactgaagtttccagagaaaatgggattgcctgcagcgcccttcctcaccaaaatagaacccagcaagcccgcggcaacgaggaagaggaggtggtcggcgccagagagccgcaaactggagaagtcagaagacgaaccacctttgactcttcctaagccttctctaattcctcaggaggttaagatttgcattgaaggccggtctaatgtaggcaagtagaggcagcgtgggggaaaggaaacgtggctctcccttatcatttgtatccagattactgtactgtaggctaaaataacacagtatttacatgttatcttcttaattttaggtttctgttctaaccttgtcattagagttacagcaggtgtgtcgcaggagactggtgcatatgctttttccacgagtgtctgtcagtgagcgggcgggaggaagggcacagcaggagcggtcagggctccaggcatccccggggaagaaaggaacggggcttcacagtgcctgccttctctagcggcacagaagcagccgggggcgctgactcccgctagtgtcaggagaaaagtcccgtgggaagagtcctgcaggggtgcagggttgcacgcatgtgggggtgcacaggcgctgtggcggcgagtgagggtctctttttctctgcctccctctgcctcactctcttgctatcggcatgggccgggggggttcagagcagtgtcctcctggggttcccacgtgcaaaatcaacatcaggaacccagcttcagggcatcgcggagacgcgtcagatggcagatttggaaagttaaccatttaaaagaacatttttctctccaacatattttacaataaaagcaacttttaattgtatagatatatatttccccctatggggcctgactgcactgatatatattttttttaaagagcaactgccacatgcgggatttcatttctgctttttactagtgcagcgatgtcaccagggtgttgtggtggacagggaagcccctgctgtcatggccccacatggggtaaggggggttgggggtgggggagagggagagagcgaacacccacgctggtttctgtgcagtgttaggaaaaccaatcaggttattgcattgacttcactcccaagaggtagatgcaaactgcccttcagtgagagcaacagaagctcttcacgttgagtttgcgaaatctttttgtctttgaactctagtactgtttatagttcatgactatggacaactcgggtgccacttttttttttttcagattccagtgtgacatgaggaattagattttgaagatgagcatatattactatctttaagcatttaaaaatactgttcacactttattaccaagcatcttggtctctcattcaacaagtactgtatctcactttaaactctttggggaaaaaacaaaaacaaaaaaaactaagttgctttctttttttcaacactgtaactacatttcagctctgcagaattgctgaagagcaagatattgaaagtttcaatgtggtttaaagggatgaatgtgaattatgaactagtatgtgacaataaatgaccaccaagtactacctgacgggaggcacttttcactttgatgtctgagaatcagttcaaggcatatgcagagttggcagagaaactgagagaaaagggatggagaagagaatactcatttttgtccagtgtttttctttttaagatgaacttttaaagaaccttgcgatttgcacatattgagtttataacttgtgtgatattcctgcagtttttatccaataacattgtgggaaaggtttgggggactgaacgagcataaataaatgtagcaaaatttctttctaacctgcctaaactctaggccattttataaggttatgttcctttgaaaattcattttggtctttttaccacatctgtcacaaaaagccaggtcttagcgggctcttagaaactctgagaattttcttcagattcattgagagagttttccataaagacatttatatatgtgagcaagattttttttaaacaattactttattattgttgttattaatgttattttcagaatggctttttttttctattcaaaatcaaatcgagatttaatgtttggtacaaacccagaaagggtatttcatagtttttaaacctttcattcccagagatccgaaatatcatttgtgggttttgaatgcatctttaaagtgctttaaaaaaaagttttataagtagggagaaatttttaaatattcttacttggatggctgcaactaaactgaacaaatacctgacttttcttttaccccattgaaaatagtactttcttcgtttcacaaattaaaaaaaaaatctggtatcaacccacattttggctgtctagtattcatttacatttagggttcaccaggactaatgatttttataaaccgttttctggggtgtaccaaaaacatttgaataggtttagaatagctagaatagttccttgactttcctcgaatttcattaccctctcagcatgcttgcagagagctgggtgggctcattcttgcagtcatactgcttatttagtgctgtattttttaaacgtttctgttcagagaacttgcttaatcttccatatattctgctcagggcacttgcaattattaggttttgtttttctttttgttttttagcctttgatggtaagaggaatacgggctgccacatagactttgttctcattaatatcactatttacaactcatgtggactcagaaaaacacacaccaccttttggcttacttcgagtattgaattgactggatccactaaaccaacactaagatgggaaaacacacatggtttggagcaataggaacatcatcataatttttgtggttctatttcaggtataggaattataaaataattggttctttctaaacacttgtcccatttcattctcttgcttttttagcatgtgcaatactttctgtgccaatagagtctgaccagtgtgctatatagttaaagctcattcccttttggctttttccttgtttggttgatcttccccattctggccagagcagggctggagggaaggagccaggagggagagagcctcccacctttcccctgctgcggatgctgagtgctggggcggggagccttcaggagccccgtgcgtctgccgccacgttgcagaaagagccagccaaggagacccgggggaggaaccgcagtgtcccctgtcaccacacggaatagtgaatgtggagtgtggagaggaaggaggcagattcatttctaagacgcactctggagccatgtagcctggagtcaacccattttccacggtcttttctgcaagtgggcaggcccctcctcggggtctgtgtccttgagacttggagccctgcctctgagcctggacgggaagtgtggcctgttgtgtgtgtgcgttctgagcgtgttggccagtggctgtggaggggaccacctgccacccacggtcaccactcccttgtggcagctttctcttcaaataggaagaacgcacagagggcaggagcctcctgtttgcagacgttggcgggccccgaggctcccagagcagcctctgtcaccgcttctgtgtagcaaacattaacgatgacaggggtagaaattcttcggtgccgttcagcttacaaggatcagccatgtgcctctgtactatgtccactttgcaatatttaccgacagccgtcttttgttctttctttcctgttttccatttttaaactagtaacagcaggccttttgcgtttacaatggaacacaatcaccaagaaattagtcagggcgaaaagaaaaaaataatactattaataagaaaccaacaaacaagaacctctctttctagggatttctaaatatataaaatgactgttccttagaatgtttaacttaagaattatttcagtttgtctgggccacactggggcagaggggggagggagggatacagagatggatgccacttacctcagatcttttaaagtggaaatccaaattgaattttcatttggactttcaggataattttctatgttggtcaacttttcgttttccctaactcacccagtttagtttgggatgatttgatttctgttgttgttgatcccatttctaacttggaattgtgagcctctatgttttctgttaggtgagtgtgttgggttttttccccccaccaggaagtggcagcatccctccttctcccctaaagggactctgcggaacctttcacacctctttctcagggacggggcaggtgtgtgtgtggtacactgacgtgtccagaagcagcactttgactgctctggagtagggttgtacaatttcaaggaatgtttggatttcctgcatcttgtggattactccttagataccgcatagattgcaatataatgctgcatgttcaagatgaacagtagctcctagtaatcataaaatccactctttgcacagtttgatctttactgaaatatgttgccaaaatttatttttgttgttgtagctctggattttgttttgttttgttttttaaggaaacgattgacaataccctttaacatctgtgactactaaggaaacctatttctttcatagagagaaaaatctccaatgcttttgaagacactaataccgtgctatttcagatatgggtgaggaagcagagctctcggtaccgaaggccgggcttcttgagctgtgttggttgtcatggctactgtttcatgaaccacaagcagctcaacagactggtctgttgccttctgaaaccctttgcacttcaatttgcaccaggtgaaaacagggccagcagactccatggcccaattcggtttcttcggtggtgatgtgaaaggagagaattacactttttttttttttaagtggcgtggaggcctttgcttccacatttgtttttaacccagaatttctgaaatagagaatttaagaacacatcaagtaataaatatacagagaatatacttttttataaagcacatgcatctgctattgtgttgggttggtttcctctcttttccacggacagtgttgtgtttctggcatagggaaactccaaacaacttgcacacctctactccggagctgagatttcttttacatagatgacctcgcttcaaatacgttaccttactgatgataggatcttttcttgtagcactataccttgtgggaatttttttttaaatgtacacctgatttgagaagctgaagaaaacaaaattttgaagcactcactttgaggagtacaggtaatgttttaaaaaattgcacaaaagaaaaatgaatgtcgaaatgattcattcagtgtttgaaagatatggctctgttgaaacaatgagtttcatactttgtttgtaaaaaaaaaaagcagagaagggttgaaagttacatgtttttttgtatatagaaatttgtcatgtctaaatgatcagatttgtatggttatggcctggaagaattactacgtaaaaggctcttaaactatacctatgcttattgttatttttgttacatatagccctcgtctgagggaggggaactcggtattctgcgatttgagaatactgttcattcctatgctgaaagtacttctctgagctcccttcttagtctaaactcttaagccattgcaacttctttttcttcagagatgatgtttgacattttcagcacttcctgttcctataaacccaaagaatataatcttgaacacgaagtgtttgtaacaagggatccaggctaccaatcaaacaggactcattatggggacaaaaaaaaaaaaaattatttcaccttctttccccccacacctcatttaaatggggggagtaaaaacatgatttcaatgtaaatgcctcattttattttagttttattttgatttttatttaatataaagaggccagaataaatacggagcatcttctcagaatagtattcctgtccaaaaatcaagccggacagtggaaactggacagctgtggggatattaagcacccccacttacaattcttaaattcagaatctcgtcccctcccttctcgttgaaggcaactgttctggtagctaactttctcctgtgtaatggcgggagggaacaccggcttcagtttttcatgtccccatgacttgcatacaaatggttcaactgtattaaaattaagtgcatttggccaataggtagtatctatacaataacaacaatctctaagaatttccataacttttcttatctgaaaggactcaagtcttccactgcagatacattggaggcttcacccacgttttctttccctttagtttgtttgctgtctggatggccaatgagcctgtctccttttctgtggccaatctgaaggccttcgttggaagtgttgttcacagtaatccttaccaagataacatactgtcctccagaataccaagtattaggtgacactagctcaagctgttgtcttcagagcagttaccaagaagctcggtgcacaggttttctctggttcttacaggaaccacctactctttcagttttctggcccaggagtggggtaaatcctttagttagtgcatttgaacttggtacctgtgcattcagttctgtgaatactgccctttttggcggggtttcctcatctccccagcctgaactgctcaactctaaacccaaattagtgtcagccgaaaggaggtttcaagatagtcctgtcagtatttgtggtgaccttcagattagacagtcttcatttccagccagtggagtcctggctccagagccatctctgagactccgtactactggatgttttaatatcagatcattacccaccatatgcctcccacaggccaagggaaaacagacaccagaacttgggttgagggcactaccagactgacatggccagtacagaggagaactagggaaggaatgatgttttgcaccttattgaaaagaaaattttaagtgcatacataatagttaagagcttttattgtgacaggagaacttttttccatatgcgtgcatactctctgtaattccagtgtaaaatattgtacttgcactagcttttttaaacaaatattaaaaaatggaagaattcatattctattttctaatcgtggtgtgtctatttgtaggatacactcgagtctgtttattgaattttatggtccctttctttgatggtgcttgcaggttttctaggtagaaattatttcattattataataaaacaatgtttgattcaaaatttgaacaaaattgttttaaataaattgtctgtataccagtacaagtttattgtttcagtatactcgtactaataaaataacagtgccaattgcaaaaaaaaaaaaaaaaaaaaaaaaaaaaaaaaaaaaaaaaaaaaaaaaaaaaaaaaa

SEQ ID NO: 290 - protein, 816 aa, Homo sapien
MKSNQERSNECLPPKKREIPATSRSSEEKAPTLPSDNHRVEGTAWLPGNPGGRGHGGGRHGPAGTSVELGLQQGIGLHKALSTGLDYSPPSAPRSVPVATTLPAAYATPQPGTPVSPVQYAHLPHTFQFIGSSQYSGTYASFIPSQLIPPTANPVTSAVASAAGATTPSQRSQLEAYSTLLANMGSLSQTPGHKAEQQQQQQQQQQQQHQHQQQQQQQQQQQQQQQHLSRAPGLITPGSPPPAQQNQYVHISSSPQNTGRTASPPAIPVHLHPHQTMIPHTLTLGPPSQVVMQYADSGSHFVPREATKKAESSRLQQAIQAKEVLNGEMEKSRRYGAPSSADLGLGKAGGKSVPHPYESRHVVVHPSPSDYSSRDPSGVRASVMVLPNSNTPAADLEVQQATHREASPSTLNDKSGLHLGKPGHRSYALSPHTVIQTTHSASEPLPVGLPATAFYAGTQPPVIGYLSGQQQAITYAGSLPQHLVIPGTQPLLIPVGSTDMEASGAAPAIVTSSPQFAAVPHTFVTTALPKSENFNPEALVTQAAYPAMVQAQIHLPVVQSVASPAAAPPTLPPYFMKGSIIQLANGELKKVEDLKTEDFIQSAEISNDLKIDSSTVERIEDSHSPGVAVIQFAVGEHRAQVSVEVLVEYPFFVFGQGWSSCCPERTSQLFDLPCSKLSVGDVCISLTLKNLKNGSVKKGQPVDPASVLLKHSKADGLAGSRHRYAEQENGINQGSAQMLSENGELKFPEKMGLPAAPFLTKIEPSKPAATRKRRWSAPESRKLEKSEDEPPLTLPKPSLIPQEVKICIEGRSNVGK

SEQ ID NO: 291 - DNA, 10660 bp, Homo sapien; identical to SEQ ID NO: 289

SEQ ID NO: 292 - protein, 816 aa, Homo sapien; identical to SEQ ID NO: 290

SEQ ID NO: 293 - DNA, 3597 bp, Homo sapien
ggcgaatggagcaggggcgcgcagataattaaagatttacacacagctggaagaaatcatagagaagccgggcgtggtggctcatgcctataatcccagcacttttggaggctgaggcgggcagatcacttgagatcaggagttcgagaccagcctggtgccttggcatctcccaatggggtggctttgctctgggctcctgttccctgtgagctgcctggtcctgctgcaggtggcaagctctgggaacatgaaggtcttgcaggagcccacctgcgtctccgactacatgagcatctctacttgcgagtggaagatgaatggtcccaccaattgcagcaccgagctccgcctgttgtaccagctggtttttctgctctccgaagcccacacgtgtatccctgagaacaacggaggcgcggggtgcgtgtgccacctgctcatggatgacgtggtcagtgcggataactatacactggacctgtgggctgggcagcagctgctgtggaagggctccttcaagcccagcgagcatgtgaaacccagggccccaggaaacctgacagttcacaccaatgtctccgacactctgctgctgacctggagcaacccgtatccccctgacaattacctgtataatcatctcacctatgcagtcaacatttggagtgaaaacgacccggcagatttcagaatctataacgtgacctacctagaaccctccctccgcatcgcagccagcaccctgaagtctgggatttcctacagggcacgggtgagggcctgggctcagtgctataacaccacctggagtgagtggagccccagcaccaagtggcacaactcctacagggagcccttcgagcagcacctcctgctgggcgtcagcgtttcctgcattgtcatcctggccgtctgcctgttgtgctatgtcagcatcaccaagattaagaaagaatggtgggatcagattcccaacccagcccgcagccgcctcgtggctataataatccaggatgctcaggggtcacagtgggagaagcggtcccgaggccaggaaccagccaagtgcccacactggaagaattgtcttaccaagctcttgccctgttttctggagcacaacatgaaaagggatgaagatcctcacaaggctgccaaagagatgcctttccagggctctggaaaatcagcatggtgcccagtggagatcagcaagacagtcctctggccagagagcatcagcgtggtgcgatgtgtggagttgtttgaggccccggtggagtgtgaggaggaggaggaggtagaggaagaaaaagggagcttctgtgcatcgcctgagagcagcagggatgacttccaggagggaagggagggcattgtggcccggctaacagagagcctgttcctggacctgctcggagaggagaatgggggcttttgccagcaggacatgggggagtcatgccttcttccaccttcgggaagtacgagtgctcacatgccctgggatgagttcccaagtgcagggcccaaggaggcacctccctggggcaaggagcagcctctccacctggagccaagtcctcctgccagcccgacccagagtccagacaacctgacttgcacagagacgcccctcgtcatcgcaggcaaccctgcttaccgcagcttcagcaactccctgagccagtcaccgtgtcccagagagctgggtccagacccactgctggccagacacctggaggaagtagaacccgagatgccctgtgtcccccagctctctgagccaaccactgtgccccaacctgagccagaaacctgggagcagatcctccgccgaaatgtcctccagcatggggcagctgcagcccccgtctcggcccccaccagtggctatcaggagtttgtacatgcggtggagcagggtggcacccaggccagtgcggtggtgggcttgggtcccccaggagaggctggttacaaggccttctcaagcctgcttgccagcagtgctgtgtccccagagaaatgtgggtttggggctagcagtggggaagaggggtataagcctttccaagacctcattcctggctgccctggggaccctgccccagtccctgtccccttgttcacctttggactggacagggagccacctcgcagtccgcagagctcacatctcccaagcagctccccagagcacctgggtctggagccgggggaaaaggtagaggacatgccaaagcccccacttccccaggagcaggccacagacccccttgtggacagcctgggcagtggcattgtctactcagcccttacctgccacctgtgcggccacctgaaacagtgtcatggccaggaggatggtggccagacccctgtcatggccagtccttgctgtggctgctgctgtggagacaggtcctcgccccctacaacccccctgagggccccagacccctctccaggtggggttccactggaggccagtctgtgtccggcctccctggcaccctcgggcatctcagagaagagtaaatcctcatcatccttccatcctgcccctggcaatgctcagagctcaagccagacccccaaaatcgtgaactttgtctccgtgggacccacatacatgagggtctcttaggtgcatgtcctcttgttgctgagtctgcagatgaggactagggcttatccatgcctgggaaatgccacctcctggaaggcagccaggctggcagatttccaaaagacttgaagaaccatggtatgaaggtgattggccccactgacgttggcctaacactgggctgcagagactggaccccgcccagcattgggctgggctcgccacatcccatgagagtagagggcactgggtcgccgtgccccacggcaggcccctgcaggaaaactgaggcccttgggcacctcgacttgtgaacgagttgttggctgctccctccacagcttctgcagcagactgtccctgttgtaactgcccaaggcatgttttgcccaccagatcatggcccacgtggaggcccacctgcctctgtctcactgaactagaagccgagcctagaaactaacacagccatcaagggaatgacttgggcggccttgggaaatcgatgagaaattgaacttcagggagggtggtcattgcctagaggtgctcattcatttaacagagcttccttaggttgatgctggaggcagaatcccggctgtcaaggggtgttcagttaaggggagcaacagaggacatgaaaaattgctatgactaaagcagggacaatttgctgccaaacacccatgcccagctgtatggctgggggctcctcgtatgcatggaacccccagaataaatatgctcagccaccctgtgggccgggcaatccagacagcaggcataaggcaccagttaccctgcatgttggcccagacctcaggtgctagggaaggcgggaaccttgggttgagtaatgctcgtctgtgtgttttagtttcatcacctgttatctgtgtttgctgaggagagtggaacagaaggggtggagttttgtataaataaagtttctttgtctc

SEQ ID NO: 294 - protein, 825 aa, Homo sapien
MGWLCSGLLFPVSCLVLLQVASSGNMKVLQEPTCVSDYMSISTCEWKMNGPTNCSTELRLLYQLVFLLSEAHTCIPENNGGAGCVCHLLMDDVVSADNYTLDLWAGQQLLWKGSFKPSEHVKPRAPGNLTVHTNVSDTLLLTWSNPYPPDNYLYNHLTYAVNIWSENDPADFRIYNVTYLEPSLRIAASTLKSGISYRARVRAWAQCYNTTWSEWSPSTKWHNSYREPFEQHLLLGVSVSCIVILAVCLLCYVSITKIKKEWWDQIPNPARSRLVAIIIQDAQGSQWEKRSRGQEPAKCPHWKNCLTKLLPCFLEHNMKRDEDPHKAAKEMPFQGSGKSAWCPVEISKTVLWPESISVVRCVELFEAPVECEEEEEVEEEKGSFCASPESSRDDFQEGREGIVARLTESLFLDLLGEENGGFCQQDMGESCLLPPSGSTSAHMPWDEFPSAGPKEAPPWGKEQPLHLEPSPPASPTQSPDNLTCTETPLVIAGNPAYRSFSNSLSQSPCPRELGPDPLLARHLEEVEPEMPCVPQLSEPTTVPQPEPETWEQILRRNVLQHGAAAAPVSAPTSGYQEFVHAVEQGGTQASAVVGLGPPGEAGYKAFSSLLASSAVSPEKCGFGASSGEEGYKPFQDLIPGCPGDPAPVPVPLFTFGLDREPPRSPQSSHLPSSSPEHLGLEPGEKVEDMPKPPLPQEQATDPLVDSLGSGIVYSALTCHLCGHLKQCHGQEDGGQTPVMASPCCGCCCGDRSSPPTTPLRAPDPSPGGVPLEASLCPASLAPSGISEKSKSSSSFHPAPGNAQSSSQTPKIVNFVSVGPTYMRVS

SEQ ID NO: 295 - DNA, 1349 bp, Homo sapien
attcgagtgctccggagaacagacccgcgccccgccgtccgcgagcctcccgagagccgtcccttcgtccggccctggagcattgcgtttgtcgccggtgtcgcagtgcgaggatggcgccgcgggtgtagcggctctctgcgcaggccgagtgggcccagagaagcgaggaactccccagatcgccgacacgtctcgtctcctgtcccaattcagggcttggtgaggtgactcgcggtcgcgggtgactcgccggcaggacactgcctggaacgcctggagcgcctcccactgcagacgtctgtccgcctccagccgctctcctctgacgggtcctgcctcagttggcggaatggcggccacgggagccaatgcagagaaagctgaaagtcacaatgattgccccgtcagacttttaaatccaaacatagcaaaaatgaaagaagatattctctatcatttcaatctcaccactagcagacacaatttcccagccttgtttggagatgtgaagtttgtgtgtgttggtggaagcccctcccggatgaaagccttcatcaggtgcgttggtgcagagctgggccttgactgcccaggtagagactatcccaacatctgtgcgggaactgaccgctatgccatgtataaagtaggaccggtgctgtctgtcagtcatggtatgggcattccttctatctcaatcatgttgcatgagctcataaagctgctgtactatgcccggtgctccaacgtcactatcatccgcattggcacttctggtgggataggtctggagcccggcactgtggtcataacagagcaggcagtggatacctgcttcaaggcagagtttgagcagattgtcctggggaagcgggtcatccggaaaacggaccttaacaagaagctggtgcaggagctgttgctgtgttctgcagagctgagcgagttcaccacagtggtggggaacaccatgtgcaccttggacttctatgaagggcaaggccgtctggatggggctctctgctcctacacggagaaggacaagcaggcgtatctggaggcagcctatgcagccggcgtccgcaatatcgagatggagtcctcggtgtttgccgccatgtgcagcgcctgcggcctccaagcggccgtggtgtgtgtcaccctcctgaaccgcctggaaggggaccagatcagcagccctcgcaatgtgctcagcgagtaccagcagaggccgcagcggctggtgagctacttcatcaagaagaaactgagcaaggcctgagcgctgccctgcacctccgcagacctgctgtgatgacttgccattaaaagcattgtccaaaccc

SEQ ID NO: 296 - protein, 310 aa, Homo sapien
MAATGANAEKAESHNDCPVRLLNPNIAKMKEDILYHFNLTTSRHNFPALFGDVKFVCVGGSPSRMKAFIRCVGAELGLDCPGRDYPNICAGTDRYAMYKVGPVLSVSHGMGIPSISIMLHELIKLLYYARCSNVTIIRIGTSGGIGLEPGTVVITEQAVDTCFKAEFEQIVLGKRVIRKTDLNKKLVQELLLCSAELSEFTTVVGNTMCTLDFYEGQGRLDGALCSYTEKDKQAYLEAAYAAGVRNIEMESSVFAAMCSACGLQAAVVCVTLLNRLEGDQISSPRNVLSEYQQRPQRLVSYFIKKKLSKA

SEQ ID NO: 297 - DNA, 1406 bp, Homo sapien
ggcacgagggcgcgcaaggcaccggtggcagcggcgacggcagctgcgacagcaacccctgctgggccgaaactgggcagagcggagcagacgtctgaagcagcgcgagtgaggcgcgagggtagcgcccgcgcccgggaagacccctcggcgcgaaccggcagcccagccccgggtcccggttcccaaggccccgcctctagggcctggggactaatcggattgagagcgcgccggcccgggccgcgaactcgccaattgcggagggcggtggccaccgcccaatccggagcagacaggtgcgaggtccggaaggcggaggccaatcggcggcggttgcgacctgctggggcaggtctcggccaataaggaggctcgagtgacatcttcgcgcaccaatcgggagtgagggagcattcgtgcccgctcgcccttccggccagacctctatttaccaggggcgtgcagcccgcttgccaatcagagcgcggctgagcggccccgcagccaacccccgaggagcggccggctggcgtccgccgcgcccaggagttggggatgtcctacaaacccatcgcccctgctcccagcagcacccctggctccagcacccctgggccgggcaccccggtccctacaggaagcgtcccgtcgccgtcgggctcagtgccaggagccggcgctcctttcagaccgctgtttaacgactttggaccgccttccatgggctacgtgcaggcgatgaagccacccggcgcccagggctcccagagcacctacacggacctgctgtcagtcatagaggagatgggcaaagagatccggcctacctatgctggcagcaagagcgccatggagcgcctgaagagaggtatcatccatgcccgggccctagtcagagagtgcctggcagagacagagcggaacgcccgcacgtaacaggaagcgcctcggcctcagcgtctggacctatccggccactgcagagcacccgcttctccctggccttcatcccgagttgcactaaccatcctgggcttcctgtcctgtgtcccttggtgggtcccctccaggaaccaaggagtggccctccaggtggcagcactaaggacacccccccacaacaagagttagcagcgaggtccccatgagtcccacccatgacctgccgacagtgttgcccaccggaacttttgtggcccctaccgctcagcccttcccagcacttctcccactttgtcccgagcctccttctcccccagcaggggcacaggcctggcacctccctgccttgtgtcctgagccatagtgactcttttatctgtgtgtcttttgctaaatatgccctttttatattaataaaagatgatttggagttgtgctctcaaaaaaaaaaaaaaaaaaaa

SEQ ID NO: 298 - protein, 126 aa, Homo sapien
MSYKPIAPAPSSTPGSSTPGPGTPVPTGSVPSPSGSVPGAGAPFRPLFNDFGPPSMGYVQAMKPPGAQGSQSTYTDLLSVIEEMGKEIRPTYAGSKSAMERLKRGIIHARALVRECLAETERNART

SEQ ID NO: 299 - DNA, 2509 bp, Homo sapien
atggcgactgcgacccccgtgccgccgcggatgggcagccgcgctggcggccccaccacgccgctgagccccacgcgcctgtcgcggctccaggagaaggaggagctgcgcgagctcaatgaccggctggcggtgtacatcgacaaggtgcgcagcctggagacggagaacagcgcgctgcagctgcaggtgacggagcgcgaggaggtgcgcggccgtgagctcaccggcctcaaggcgctctacgagaccgagctggccgacgcgcgacgcgcgctcgacgacacggcccgcgagcgcgccaagctgcagatcgagctgggcaagtgcaaggcggaacacgaccagctgctcctcaactatgctaagaaggaatctgatcttaatggcgcccagatcaagcttcgagaatatgaagcagcactgaattcgaaagatgcagctcttgctactgcacttggtgacaaaaaaagtttagagggagatttggaggatctgaaggatcagattgcccagttggaagcctccttagctgcagccaaaaaacagttagcagatgaaactttacttaaagtagatttggagaatcgttgtcagagccttactgaggacttggagtttcgcaaaagcatgtatgaagaggagattaacgagaccagaaggaagcatgaaacgcgcttggtagaggtggattctgggcgtcaaattgagtatgagtacaagctggcgcaagcccttcatgagatgagagagcaacatgatgcccaagtgaggctgtataaggaggagctggagcagacttaccatgccaaacttgagaatgccagactgtcatcagagatgaatacttctactgtcaacagtgccagggaagaactgatggaaagccgcatgagaattgagagcctttcatcccagctttctaatctacagaaagagtctagagcatgtttggaaaggattcaagaattagaggacttgcttgctaaagaaaaagacaactctcgtcgcatgctgacagacaaagagagagagatggcggaaataagggatcaaatgcagcaacagctgaatgactatgaacagcttcttgatgtaaagttagccctggacatggaaatcagtgcttacaggaaactcttagaaggcgaagaagagaggttgaagctgtctccaagcccttcttcccgtgtgacagtatcccgagcatcctcaagtcgtagtgtacgtacaactagaggaaagcggaagagggttgatgtggaagaatcagaggcgagtagtagtgttagcatctctcattccgcctcagccactggaaatgtttgcatcgaagaaattgatgttgatgggaaatttatccgcttgaagaacacttctgaacaggatcaaccaatgggaggctgggagatgatcagaaaaattggagacacatcagtcagttataaatatacctcaagatatgtgctgaaggcaggccagactgttacaatttgggctgcaaacgctggtgtcacagccagccccccaactgacctcatctggaagaaccagaactcgtggggcactggcgaagatgtgaaggttatattgaaaaattctcagggagaggaggttgctcaaagaagtacagtctttaaaacaaccatacctgaagaagaggaggaggaggaagaagcagctggagtggttgttgaggaagaacttttccaccagcagggaaccccaagagcatccaatagaagctgtgcaattatgtaaaattttcaactgtcttcctcaaaataaagaagtatggtaatctttacctgtatacagtgcagagccttctcagaagcacagaatatttttatatttcctttatgtgaatttttaagctgcaaatctgatggccttaatttcctttttgacactgaaagttttgtaaaagaaatcatgtccatacactttgttgcaagatgtgaattattgacactgaacttaataactgtgtactgttcggaaggggttcctcaaattttttgactttttttgtatgtgtgttttttctttttttttaagttcttatgaggaggggagggtaaataaaccactgtgcgtcttggtgtaatttgaagattgccccatctagactagcaatctcttcattattctctgctatatataaaacggtgctgtgagggaggggaaaagcatttttcaatatattgaacttttgtactgaatttttttgtaataagcaatcaaggttataattttttttaaaatagaaattttgtaagaaggcaatattaacctaatcaccatgtaagcactctggatgatggattccacaaaacttggttttatggttacttcttctcttagattcttaattcatgaggagggtgggggagggaggtggagggagggaagggtttctctattaaaatgcattcgttgtgttttttaagatagtgtaacttgcttaaatttcttatgtgacattaacaaataaaaaagctctttt

SEQ ID NO: 300 - protein, 586 aa, Homo sapien
MATATPVPPRMGSRAGGPTTPLSPTRLSRLQEKEELRELNDRLAVYIDKVRSLETENSALQLQVTEREEVRGRELTGLKALYETELADARRALDDTARERAKLQIELGKCKAEHDQLLLNYAKKESDLNGAQIKLREYEAALNSKDAALATALGDKKSLEGDLEDLKDQIAQLEASLAAAKKQLADETLLKVDLENRCQSLTEDLEFRKSMYEEEINETRRKHETRLVEVDSGRQIEYEYKLAQALHEMREQHDAQVRLYKEELEQTYHAKLENARLSSEMNTSTVNSAREELMESRMRIESLSSQLSNLQKESRACLERIQELEDLLAKEKDNSRRMLTDKEREMAEIRDQMQQQLNDYEQLLDVKLALDMEISAYRKLLEGEEERLKLSPSPSSRVTVSRASSSRSVRTTRGKRKRVDVEESEASSSVSISHSASATGNVCIEEIDVDGKFIRLKNTSEQDQPMGGWEMIRKIGDTSVSYKYTSRYVLKAGQTVTIWAANAGVTASPPTDLIWKNQNSWGTGEDVKVILKNSQGEEVAQRSTVFKTTIPEEEEEEEEAAGVVVEEELFHQQGTPRASNRSCAIM

SEQ ID NO: 301 - DNA, 4023 bp, Homo sapien
atcaaatgtggggtttgttacattccgctgccgccgcggacagttcttaaagggccagccgccggctgccgcgcagacccagctgcgtcctgcgccgcctcccgctccctgagggcctgggccgagagagactgatcgcgcgtgggcctcgcgaggcagacgccgtcgggcggacaacaaagagagaggccccggaaggagccgggctgcccccggacccgggggtggggaggggagcacattgttccgcagggcgggagctcttaaaggatccagacaggcaccccccccctcccccgccccctgcccagtttggccgtcctagatcgggaacaaaggagtcaacgtgtggccgggcggccaaagggttgtgagtcccggcccagcccctccacccccctgcccccccgatgcgaccatgggctctggcagtgactaggtggccaccctccgcccccgtgggccagcggcgattctctgcgggacctggcagcaccccgggccagctctggggaagccctggcctcgagggccccctggccagcccgcctgcccgggatgagcgcttaccctcccagcagccgccgtcccgacctccacacctccccgtagaggagcgccgagcctcggctcctgccggcgggagcccccgaatgctgcacccagccacccagcagagcccgttcatggttgatctccacgagcaggtgcaccagggacctgtccctctgtcctacacggtcaccacagtgacgacccaaggcttccccttgcctacaggccagcacatccctggctgcagtgcccagcagctcccagcatgctccgtgatgttcagtgggcagcattaccccctctgctgcctcccgcccccgcttatccaggcgtgcaccatgcagcagctgcctgtgccctatcaggcctacccccacctcatctccagtgaccactacatcctgcaccccccaccaccggccccacccccccagcccacccacatggcgcccctggggcagtttgtgtctctgcagacccagcaccctcggatgcccctccagcggctcgacaacgacgtggacctgcgtggggaccagccctccctgggcagcttcacctactccacctctgcgcctggcccagccctttccccgtcggtgcccctgcactacctgccccacgatccgctgcaccaggagctgtcctttggtgtgccatattctcacatgatgccacggagactgagcacccagagataccgcctgcagcagccactgcccccgccgcccccacccccacccccaccaccctactaccccagcttcctgccctacttcctctcgatgctgccaatgtcaccaacagcaatggggcccaccatcagcctggacctggacgtggatgatgtggagatggagaactatgaggccctcctgaacctggccgagcggctgggagatgccaagccccggggtctcaccaaagcagacatagagcagctcccgtcgtaccgctttaacccggacagccatcagtcggagcagacgctgtgtgtggtctgcttcagtgacttcgaggcgcggcagctgctccgagtcctcccctgcaaccatgagttccacaccaagtgtgttgacaagtggttgaaggccaaccggacgtgtcccatctgccgggccgacgcctccgaggtgcccagggaggctgagtgaggccacgcagccgcctgcccgggagaaccctgcctgaagctctggaaacttgtgggtggggcccagggaggatggggagggagtggcccaggcctgccccttcgctcctgcctgcatttccagagctggtgccagggtcagcccagcgaggagtccctgcaataagcccctgcatttgccaagctccaaagactccctccctagtctgcctgcccgcccgcccgccacggagctgcctgagtgtccctgatcgggtctccctcctgtgcaccctcaggtccctccttttcctgctggcactgagtgccaggggtccgctccctcagtggggccggtggagatccttggccccaggatgggcagacagagcaccatcctgggtcagaaggtctcatgctctgaaatggcgtgccctctgcccaggtggcactgccaggtgcgtagacagacggtgtcacgagccatttcctgagccccagggctgaatcccccctccttgaccccgaacagtgaactcaggcagctggctctgtgttggctgctgtgagggctgagtctggttccctaggggaccctcatcccaggaacaacattccagccccaccctcaggctggagggcgtcccagcctaatcccgagctggggcacacgtatcctgaggggcttgggccatacggggagagggagccctgtgttcccggtggttgtccctcccagggatgcagccagacccgtgcccaatctcctctccctctgttgttttgcatgaacgtgaggagcagcagtttttgttcattcatttggcccaaaatcacgtgtaggatttggggatgtggatatttaagacaatttcttttttcttttggtttaataggggcgggtatagggaccaactgggaccgagtgcccagggggccgagcacggtcatgctggccggcctgcatgcatgcgtgtgccgggctgggctgggcggccggcggtcgtggggcagggttgggggtctgtgctcagctgataactgccatgcactgtactgcacacgtccctagagcctaccgggacccgacgcttttcagggcatttctccctccagccagggcccaactcccacctgcctgggcgaatctcctccaaggaagtcccaggaggatggggaccaggaaggctgtggacccccatctccagggggccttcccagcctgatccctgtcctccaagttctggaggaggccgctgtagggtctggctgagcttcccacccactttccctggtcccaatcctttcttgtcctatacccagctggggttgctgccctgaacgaactgcgtgtggggccggcacatcctagcaggcagcccctggcgcctgctgcctcagggatgctccaaccaccctcgttctcctcgcagtggccctggctcccacctcccgccccagcctgccgtggggcccgtcagcctggtcccacccccatggagaacccaaagtcttactgtatataactccaggtgacgtttctatatttatagcagtgttgaaaacccacgtgttttacacagaaccaccctctccaacccctcccttcccgaccccaacaaaacgttttcaaaccccttacagttcctggggcaggcggaaacaggctcacagattgtgtgtcggctgcagcagtgattccaacaagcagctattgggggggaaacacagcatttaaaaagatcatcattaaaaaacaagatttatacaacaattacttaggatgtttgtgatccgccgaccttgctatagatgccatgttaccaatgatttcctgtggtgggggcttgccattgtttactctcttatttaccaacttctggcctaggcatgacagtgggcaccttcccccagccctggctgggcccagcgcctgtgttctgtgttagaaaggttttatatatatataaaattacatatatatgtagaaatatatgtaattttgggggccctgttccttgcacattttacagttacctcatttttcccatgtatgtatttgagaaaatgctaatatatagagaaaaaaatggttcttaaagcttaaatgtgtggttttttccattccatgggattcacattggtttgtagcatttaacataactagtatgttgtattatatatatgtgtatactgattgaaatttttaacagatttgtactttttttaaaatgaaagttgctagttctgcttgaccaagtagtgcaatcattattttttttaatattgttgctgatttcagagggatattcactaataaatgtatgatgtatacc

SEQ ID NO: 302 - protein, 432 aa, Homo sapien
MRPWALAVTRWPPSAPVGQRRFSAGPGSTPGQLWGSPGLEGPLASPPARDERLPSQQPPSRPPHLPVEERRASAPAGGSPRMLHPATQQSPFMVDLHEQVHQGPVPLSYTVTTVTTQGFPLPTGQHIPGCSAQQLPACSVMFSGQHYPLCCLPPPLIQACTMQQLPVPYQAYPHLISSDHYILHPPPPAPPPQPTHMAPLGQFVSLQTQHPRMPLQRLDNDVDLRGDQPSLGSFTYSTSAPGPALSPSVPLHYLPHDPLHQELSFGVPYSHMMPRRLSTQRYRLQQPLPPPPPPPPPPPYYPSFLPYFLSMLPMSPTAMGPTISLDLDVDDVEMENYEALLNLAERLGDAKPRGLTKADIEQLPSYRFNPDSHQSEQTLCVVCFSDFEARQLLRVLPCNHEFHTKCVDKWLKANRTCPICRADASEVPREAE

SEQ ID NO: 303 - DNA, 3246 bp, Homo sapien
cgcaccataccggcgcgggcacctggggagaaatggatggagaagggacctggctggaaagctttgccccgctgctctgctccgcccataagaggacccctgaaatgtcccgtgcagtttgttcaagtcccctgtgtgatgaaatgtgcctctcgccttacccgtgtgagaatacctgtggtgtggcagcgagtattttggtatttgacctgtccaaagacgacttgatacctctataatgtaacagaaaaggtcagaaaatattaagcaagtagaagtgtggagcatattaagcaagatgaacatctcgggaagcagctgtggaagccctaactctgcagatacatctagtgactttaaggacctttggacaaaactaaaagaatgtcatgatagagaagtacaaggtttacaagtaaaagtaaccaagctaaaacaggaacgaatcttagatgcacaaagactagaagaattcttcaccaaaaatcaacagctgagggaacagcagaaagtccttcatgaaaccattaaagttttagaagatcggttaagagcaggcttatgtgatcgctgtgcagtaactgaagaacatatgcggaaaaaacagcaagagtttgaaaatatccggcagcagaatcttaaacttattacagaacttatgaatgaaaggaatactctacaggaagaaaataaaaagctttctgaacaactccagcagaaaattgagaatgatcaacagcatcaagcagctgagcttgaatgtgaggaagacgttattccagattcaccgataacagccttctcattttctggcgttaaccggctacgaagaaaggagaacccccatgtccgatacatagaacaaacacatactaaattggagcactctgtgtgtgcaaatgaaatgagaaaagtttccaagtcttcaactcatccacaacataatcctaatgaaaatgaaattctagtagctgacacttatgaccaaagtcaatctccaatggccaaagcacatggaacaagcagctatacccctgataagtcatcttttaatttagctacagttgttgctgaaacacttggacttggtgttcaagaagaatctgaaactcaaggtcccatgagcccccttggtgatgagctctaccactgtctggaaggaaatcacaagaaacagccttttgaggaatctacaagaaatactgaagatagtttaagattttcagattctacttcaaagactcctcctcaagaagaattacctactcgagtgtcatctcctgtatttggagctacctctagtatcaaaagtggtttagatttgaatacaagtttgtccccttctcttttacagcctgggaaaaaaaaacatctgaaaacactcccttttagcaacacttgtatatctagattagaaaaaactagatcaaaatctgaagatagtgcccttttcacacatcacagtcttgggtctgaagtgaacaagatcattatccagtcatctaataaacagatacttataaataaaaatataagtgaatccctaggtgaacagaataggactgagtacggtaaagattctaacactgataaacatttggagcccctgaaatcattgggaggccgaacatccaaaaggaagaaaactgaggaagaaagtgaacatgaagtaagctgcccccaagcttcttttgataaagaaaatgctttcccttttccaatggataatcagttttccatgaatggagactgtgtgatggataaacctctggatctgtctgatcgattttcagctattcagcgtcaagagaaaagccaaggaagtgagacttctaaaaacaaatttaggcaagtgactctttatgaggctttgaagaccattccaaagggcttttcctcaagccgtaaggcctcagatggcaactgcacgttgcccaaagattccccaggggagccctgttcacaggaatgcatcatccttcagcccttgaataaatgctctccagacaataaaccatcattacaaataaaagaagaaaatgctgtctttaaaattcctctacgtccacgtgaaagtttggagactgagaatgttttagatgacataaagagtgctggttctcatgagccaataaaaatacaaaccaggtcagaccatggaggatgtgaacttgcatcagttcttcagttaaatccatgtagaactggtaaaataaagtctctacaaaacaaccaagatgtatcctttgaaaatatccagtggagtatagatccgggagcagacctttctcagtataaaatggatgttactgtaatagatacaaaggatggcagtcagtcaaaattaggaggagagacagtggacatggactgtacattggttagtgaaaccgttctcttaaaaatgaagaagcaagagcagaagggagaaaaaagttcaaatgaagaaagaaaaatgaatgatagcttggaagatatgtttgatcggacaacacatgaagagtatgaatcctgtttggcagacagtttctcccaagcagcagatgaagaggaggaattgtctactgccacaaagaaactacacactcatggtgataaacaagacaaagtcaagcagaaagcgtttgtggagccgtattttaaaggtgatgaaagagagactagcttgcaaaattttcctcatattgaggtggttcggaaaaaagaggagagaagaaaactgcttgggcacacgtgtaaggaatgtgaaatttattatgcagatatgccagcagaagaaagagaaaagaaattggcttcctgctcaagacaccgattccgctacattccacccaacacaccagagaatttttgggaagttggttttccttccactcagacttgtatggaaagaggttatattaaggaagatcttgatccttgtcctcgtccaaaaagacgtcagccttacaacgcaatattttctccaaaaggcaaggagcagaagacatagacgttgaaacagaaacagaaggatgaaggacagttttttccttcttagttatttatagttaaagttggtactaaacattgatttttttgatcttctgtaaatggatttataaatcagttttctattgaaaatgtttgtgatattttgcttttgcacctttaaaacaataaggcgctttcattttgcactctaacttaagagtttttactttatgtagtgatacctaatacaattttgaaaatacaaaaaaaaaa

SEQ ID NO: 304 - protein, 897 aa, Homo sapien
MNISGSSCGSPNSADTSSDFKDLWTKLKECHDREVQGLQVKVTKLKQERILDAQRLEEFFTKNQQLREQQKVLHETIKVLEDRLRAGLCDRCAVTEEHMRKKQQEFENIRQQNLKLITELMNERNTLQEENKKLSEQLQQKIENDQQHQAAELECEEDVIPDSPITAFSFSGVNRLRRKENPHVRYIEQTHTKLEHSVCANEMRKVSKSSTHPQHNPNENEILVADTYDQSQSPMAKAHGTSSYTPDKSSFNLATVVAETLGLGVQEESETQGPMSPLGDELYHCLEGNHKKQPFEESTRNTEDSLRFSDSTSKTPPQEELPTRVSSPVFGATSSIKSGLDLNTSLSPSLLQPGKKKHLKTLPFSNTCISRLEKTRSKSEDSALFTHHSLGSEVNKIIIQSSNKQILINKNISESLGEQNRTEYGKDSNTDKHLEPLKSLGGRTSKRKKTEEESEHEVSCPQASFDKENAFPFPMDNQFSMNGDCVMDKPLDLSDRFSAIQRQEKSQGSETSKNKFRQVTLYEALKTIPKGFSSSRKASDGNCTLPKDSPGEPCSQECIILQPLNKCSPDNKPSLQIKEENAVFKIPLRPRESLETENVLDDIKSAGSHEPIKIQTRSDHGGCELASVLQLNPCRTGKIKSLQNNQDVSFENIQWSIDPGADLSQYKMDVTVIDTKDGSQSKLGGETVDMDCTLVSETVLLKMKKQEQKGEKSSNEERKMNDSLEDMFDRTTHEEYESCLADSFSQAADEEEELSTATKKLHTHGDKQDKVKQKAFVEPYFKGDERETSLQNFPHIEVVRKKEERRKLLGHTCKECEIYYADMPAEEREKKLASCSRHRFRYIPPNTPENFWEVGFPSTQTCMERGYIKEDLDPCPRPKRRQPYNAIFSPKGKEQKT

SEQ ID NO: 305 - DNA, 1390 bp, Homo sapien
gggaagtgctgttggagccgctgtggttgctgtccgcggagtggaagcgcgtgcttttgtttgtgtccctggccatggcgctgcagctctcccgggagcagggaatcaccctgcgcgggagcgccgaaatcgtggccgagttcttctcattcggcatcaacagcattttatatcagcgtggcatatatccatctgaaacctttactcgagtgcagaaatacggactcaccttgcttgtaactactgatcttgagctcataaaatacctaaataatgtggtggaacaactgaaagattggttatacaagtgttcagttcagaaactggttgtagttatctcaaatattgaaagtggtgaggtcctggaaagatggcagtttgatattgagtgtgacaagactgcaaaagatgacagtgcacccagagaaaagtctcagaaagctatccaggatgaaatccgttcagtgatcagacagatcacagctacggtgacatttctgccactgttggaagtttcttgttcatttgatctgctgatttatacagacaaagatttggttgtacctgaaaaatgggaagagtcgggaccacagtttattaccaattctgaggaagtccgccttcgttcatttactactacaatccacaaagtaaatagcatggtggcctacaaaattcctgtcaatgactgaggatgacatgaggaaaataatgtaattgtaattttgaaatgtggttttcctgaaatcaggtcatctatagttgatatgttttatttcattggttaatttttacatggagaaaaccaaaatgatacttactgaactgtgtgtaattgttcctttatttttttggtacctatttgacttaccatggagttaacatcatgaatttattgcacattgttcaaaaggaaccaggaggtttttttgtcaacattgtgatgtatattcctttgaagatagtaactgtagatggaaaaacttgtgctataaagctagatgctttcctaaatcagatgttttggtcaagtagtttgactcagtataggtagggagatatttaagtataaaatacaacaaaggaagtctaaatattcagaatctttgttaaggtcctgaaagtaactcataatctataaacaatgaaatattgctgtatagctccttttgaccttcatttcatgtatagttttccctattgaatcagtttccaattatttgactttaatttatgtaacttgaacctatgaagcaatggatatttgtactgtttaatgttctgtgatacagaactcttaaaaatgttttttcatgtgttttataaaatcaagttttaagtgaaagtgaggaaataaagttaagtttgttttaaaaaaaaaaaaaaaaaa

SEQ ID NO: 306 - protein, 205 aa, Homo sapien
MALQLSREQGITLRGSAEIVAEFFSFGINSILYQRGIYPSETFTRVQKYGLTLLVTTDLELIKYLNNVVEQLKDWLYKCSVQKLVVVISNIESGEVLERWQFDIECDKTAKDDSAPREKSQKAIQDEIRSVIRQITATVTFLPLLEVSCSFDLLIYTDKDLVVPEKWEESGPQFITNSEEVRLRSFTTTIHKVNSMVAYKIPVND

SEQ ID NO: 307 - DNA, 2210 bp, Homo sapien
agccgcggcctcaactaaaagtggccattgacctttcaagctttcgagcagtgatgcaatagaatagtatttcaaagaaaaatgcttatcgaaattttggatccggttttcccgtgattgttaagggtttcttttaaaaagtaggtcacatttcaagtaggtcatatttcgggggcgggtgcgcagacaaggagatgagtttccactaaggccagggggcctccaacggggttggaggtgagaatcccaggtagggtagaggtgccgagatccttccgaatcccagccctggggcgtcagccctgcagggaatggcagagacactctccggactgagggaaccgaggccagtcaccaagccccttccgggcgcgcaggcgatcagtgggtgaccgcggctgcgagggactttgtcatccgtcctccaggatctggggagaaagagccccatcccttctctctctgccaccatttcggacaccccgcagggactcgttttgggattcgcactgacttcaaggaaggacgcgaacccttctctgaccccagctcgggcggccacctgtctttgccgcggtgacccttctctcatgaccctgcggtgccttgagccctccgggaatggcggggaagggacgcggagccagtgggggaccgcggggtcggcggaggagccatccccgcaggcggcgcgtctggcgaaggccctgcgggagctcggtcagacaggatggtactggggaagtatgactgttaatgaagccaaagagaaattaaaagaggcaccagaaggaactttcttgattagagatagctcgcattcagactacctactaacaatatctgttaaaacatcagctggaccaactaatcttcgaatcgaataccaagacggaaaattcagattggactctatcatatgtgtcaaatccaagcttaaacaatttgacagtgtggttcatctgatcgactactatgttcagatgtgcaaggataagcggacaggtccagaagccccccggaacggcactgttcacctttatctgaccaaaccgctctacacgtcagcaccatctctgcagcatctctgtaggctcaccattaacaaatgtaccggtgccatctggggactgcctttaccaacaagactaaaagattacttggaagaatataaattccaggtataaatgtttctctttttttaaacatgtctcacatagagtatctccgaatgcagctatgtaaaagagaaccaaaacttgagtgctctggataactatatggaatgctttctaagaacagctgaagctaatctaatttaaatttaacagcttgaagaggtagctaggtgtttaaagttcctccagatacttttacctgagtgatgcttcccttcctaaggctgaccaagacctgttgatccttttagattaaaaataaaatgtcgcatgtaaaggctgaagtcgcgttttatcagaatgccttgccttcttaggttcttttccattatgtcaaaggtccaggctccagtaggagagaaagaactcctcataggaatactgaagaagtgggaaggaaccaagctgacacaggcctcactgcaatttgatatgcctgctgatcagagtctcttgggcattttatattttgcattctgatgtacctaggagttttgttaaacagatgatgtatgtgagtatttatcccattttatgcaattaaccaaatcaaccaaaaaaagtgaccatgaagtcctgtatttgtctttttactacatgtaggaactctcatgtgaatgagtactgtagtaatccattctatgggagccttatttcagaaatatttcaaactggtgcaaatggaaaagactttctcttttcctttaaagctaaagacaagaatatcatgctatacaggtgcaactcaatccccgttaataaaaaccaatgtaggtataggcattctaccctttgaaatagctgtgtcccaacctgttgccattgattttttggaaatggctttagaaatatccaagttgtccttgaattgtctaaccatggacataaacagttgtctcccttctactgtgtagaatactttgacttaattttcttccagatacagggggatacctgcctgtttttcaaagtgtttatttactgctgttactatttgattagaatgtattaaataaaaaaaacctgatttct

SEQ ID NO: 308 - protein, 198 aa, Homo sapien
MTLRCLEPSGNGGEGTRSQWGTAGSAEEPSPQAARLAKALRELGQTGWYWGSMTVNEAKEKLKEAPEGTFLIRDSSHSDYLLTISVKTSAGPTNLRIEYQDGKFRLDSIICVKSKLKQFDSVVHLIDYYVQMCKDKRTGPEAPRNGTVHLYLTKPLYTSAPSLQHLCRLTINKCTGAIWGLPLPTRLKDYLEEYKFQV

SEQ ID NO: 309 - DNA, 2210 bp, Homo sapien; identical to SEQ ID NO: 307

SEQ ID NO: 310 - protein, 198 aa, Homo sapien; identical to SEQ ID NO: 308

SEQ ID NO: 311 - DNA, 714 bp, Homo sapien
gggtgagcaaaggggcgggtccctggctgctgtggcctcccctgaccccctccccccgctgctggggtcctcggccaagcccccttctcactggactgagacatgaggctgagctggttccgggtcctgacagtactgtccatctgcctgagcgccgtggccacggccacgggggccgagggcaaaaggaagctgcagatcggggtcaagaagcgggtggaccactgtcccatcaaatcgcgcaaaggggatgtcctgcacatgcactacacggggaagctggaagatgggacagagtttgacagcagcctgccccagaaccagccctttgtcttctcccttggcacaggccaggtcatcaagggctgggaccaggggctgctggggatgtgtgagggggaaaagcgcaagctggtgatcccatccgagctagggtatggagagcggggagctcccccaaagattccaggcggtgcaaccctggtgttcgaggtggagctgctcaaaatagagcgacgaactgagctgtaaccagactggggaggggcagggggagaggcccccatcagggaccagactgttccaaaaaaaaaacaaaaaacaaaaacaaacaaaaaaacacttaaaagcccaaggagtaagcctgtgtgtttgtgggccctgagagactcagagacctcagctccagcataccccaccaccttctcctttccc

SEQ ID NO: 312 - protein, 142 aa, Homo sapien
MRLSWFRVLTVLSICLSAVATATGAEGKRKLQIGVKKRVDHCPIKSRKGDVLHMHYTGKLEDGTEFDSSLPQNQPFVFSLGTGQVIKGWDQGLLGMCEGEKRKLVIPSELGYGERGAPPKIPGGATLVFEVELLKIERRTEL

SEQ ID NO: 313 - DNA, 2029 bp, Homo sapien
actcagtgttcgcgggagccgcacctacaccagccaacccagatcccgaggtccgacagcgcccggcccagatccccacgcctgccaggagcaagccgagagccagccggccggcgcactccgactccgagcagtctctgtccttcgacccgagccccgcgccctttccgggacccctgccccgcgggcagcgctgccaacctgccggccatggagaccccgtcccagcggcgcgccacccgcagcggggcgcaggccagctccactccgctgtcgcccacccgcatcacccggctgcaggagaaggaggacctgcaggagctcaatgatcgcttggcggtctacatcgaccgtgtgcgctcgctggaaacggagaacgcagggctgcgccttcgcatcaccgagtctgaagaggtggtcagccgcgaggtgtccggcatcaaggccgcctacgaggccgagctcggggatgcccgcaagacccttgactcagtagccaaggagcgcgcccgcctgcagctggagctgagcaaagtgcgtgaggagtttaaggagctgaaagcgcgcaataccaagaaggagggtgacctgatagctgctcaggctcggctgaaggacctggaggctctgctgaactccaaggaggccgcactgagcactgctctcagtgagaagcgcacgctggagggcgagctgcatgatctgcggggccaggtggccaagcttgaggcagccctaggtgaggccaagaagcaacttcaggatgagatgctgcggcgggtggatgctgagaacaggctgcagaccatgaaggaggaactggacttccagaagaacatctacagtgaggagctgcgtgagaccaagcgccgtcatgagacccgactggtggagattgacaatgggaagcagcgtgagtttgagagccggctggcggatgcgctgcaggaactgcgggcccagcatgaggaccaggtggagcagtataagaaggagctggagaagacttattctgccaagctggacaatgccaggcagtctgctgagaggaacagcaacctggtgggggctgcccacgaggagctgcagcagtcgcgcatccgcatcgacagcctctctgcccagctcagccagctccagaagcagctggcagccaaggaggcgaagcttcgagacctggaggactcactggcccgtgagcgggacaccagccggcggctgctggcggaaaaggagcgggagatggccgagatgcgggcaaggatgcagcagcagctggacgagtaccaggagcttctggacatcaagctggccctggacatggagatccacgcctaccgcaagctcttggagggcgaggaggagaggctacgcctgtcccccagccctacctcgcagcgcagccgtggccgtgcttcctctcactcatcccagacacagggtgggggcagcgtcaccaaaaagcgcaaactggagtccactgagagccgcagcagcttctcacagcacgcacgcactagcgggcgcgtggccgtggaggaggtggatgaggagggcaagtttgtccggctgcgcaacaagtccaatgaggaccagtccatgggcaattggcagatcaagcgccagaatggagatgatcccttgctgacttaccggttcccaccaaagttcaccctgaaggctgggcaggtggtgacgatctgggctgcaggagctggggccacccacagcccccctaccgacctggtgtggaaggcacagaacacctggggctgcgggaacagcctgcgtacggctctcatcaactccactggggaagaagtggccatgcgcaagctggtgcgctcagtgactgtggttgaggacgacgaggatgaggatggagatgacctgctccatcaccaccatgtgagtggtagccgccgctgaggccgagcctgcactggggccacccagccaggcctgggggcagcctctccccagcctccccgtgccaaaaatcttttcattaaagaatgtttggaacttt

SEQ ID NO: 314 - protein, 572 aa, Homo sapien
METPSQRRATRSGAQASSTPLSPTRITRLQEKEDLQELNDRLAVYIDRVRSLETENAGLRLRITESEEVVSREVSGIKAAYEAELGDARKTLDSVAKERARLQLELSKVREEFKELKARNTKKEGDLIAAQARLKDLEALLNSKEAALSTALSEKRTLEGELHDLRGQVAKLEAALGEAKKQLQDEMLRRVDAENRLQTMKEELDFQKNIYSEELRETKRRHETRLVEIDNGKQREFESRLADALQELRAQHEDQVEQYKKELEKTYSAKLDNARQSAERNSNLVGAAHEELQQSRIRIDSLSAQLSQLQKQLAAKEAKLRDLEDSLARERDTSRRLLAEKEREMAEMRARMQQQLDEYQELLDIKLALDMEIHAYRKLLEGEEERLRLSPSPTSQRSRGRASSHSSQTQGGGSVTKKRKLESTESRSSFSQHARTSGRVAVEEVDEEGKFVRLRNKSNEDQSMGNWQIKRQNGDDPLLTYRFPPKFTLKAGQVVTIWAAGAGATHSPPTDLVWKAQNTWGCGNSLRTALINSTGEEVAMRKLVRSVTVVEDDEDEDGDDLLHHHHVSGSRR

SEQ ID NO: 315 - DNA, 2533 bp, Homo sapien
ccaagcccatgagggccgcgcgcccggccgccggtgctgacgagacggagctcctggcccccgaggaggagcagaggatcaatgcggttcaagaatcgattccagcggttcatgaaccatcgagctccagccaatggccgctacaagccaacttgctatgaacatgctgctaactgttacacacacgcattcctcattgttccggccatcgtgggcagtgccctcctccatcggctgtctgatgactgctgggaaaagataacagcatggatttatggaatgggactctgtgccctcttcatcgcttctacagtatttcacattgtatcatggaaaaagagccacttaaggacagcggagcattgttttcacatgtgtgatagaatggttatctatttcttcattgctgcttcttatgctccatggttaaatcttcgtgaacttggacccctggcatctcatatgcgttggtttatctggctcatggcagctggaggaaccatttatgtatttctctaccatgaaaaatataaggtggttgaactctttttctatctcacaatgggattctctccagccttggtggtgacatcaatgaacaacaccgatggacttcaggaacttgcctgtgggggcttaatttattgcttgggagttgtgttcttcaagagtgatggcatcattccatttgcccacgccatctggcacctgtttgtggccacggcagctgcagtgcattactacgccatttggaaatacctttaccgaagtcctacggactttatgcggcatttatgaccaatctgtactaattctccaaaccagtattatttcaattatggcacttgggagtggggtgagagctaaacattgcacagggcaaagaaaaaaaataactgcactgactttatatcttttgaatataattactgtgaaagtataaaggctgtgttctggaattttctgcctcacagcaaataaataaggtagtgaattaattattcattccattccactatcatgaaggactctgaatagacttggccaactgatgtttacaaaccagacttttatattttaattttacagattttactacatgatttttctaaattactatgtcaggttgtaaaagtcagtgcaataacaaaccttcctttttaagaagaaaattgtttctattactttcccattcactaggtaaagaatcatggacagaacttacactactttttaccatgtttcatcttggcataacatggttcttttttaaatagaaactttagttttttgtaaatttttaaaaaaatatttcattgatatgcatctctgcaggtcctcattcatgttgtaaatttttggagcaagcagtcaacattccacaaacgaacaaacattatacctcttctgatagttttattaagcatggagaaattgccaatttttaaaaactgcagttttccaaacttttctgccaacctcttactctgaattcagtgctgctttgggacatatacttgacctagcttggtttaccagtgatggaaaagtattttgatatcattaactttttcaaaagatccaactttttctctatgcctttgccacattctcttcagggtctctttccacagcggataaatgttttttctgtattatgacagtattgttgtgatggccatctgctggaaactcctgaagagcattatgtattacagtgagcagttgtattgcctgtttggtgcccaatggttaagtcattgtcacttagctttatattgtcagtttgatatttattttaaattgtggaactagatgcataaattcacatttctgcctttcctttgcatcttctcatatattgtgttttttttttttttcctagaaaaaatatttaaagcattgtttgacaggtagaaactcatgtatctgtagtccatgagttatatcctggctcagtggagtgatatttatgtattatttttacttttctctcagtgtcttatattaagattaacatgttgttaatagttgctttgttgattaatctctcttgttggtgttttaataaatgaaataggcttgcctttagatcgggtgctgatattgcctgtttcctagtaatgggctgatcaaatgatcagtggaattcttggtttgatgataaccttattaattgaaattttttactgatgtggctttaaaagaggtttattttgtatatgtttagaactctctgattttgatgaattatatgggagtgagaaacagaagaagtggtatttgctggcgagttaaataggcaaggtacccagtgataacaccaaccaaaccactcctatctgcatgattctgaacatctggatgcctgttgttttactgtgtatattttatttttaatatattaactttgtggattcatttaaggtctactcaaaagtaacactgtccaaaccactaatatgtatgtaaaaattgtgctgtatactacaataaagttgttacttggatttgttccaaaaaaaaaaaaaaa

SEQ ID NO: 316 - protein, 238 aa, Homo sapien
MRFKNRFQRFMNHRAPANGRYKPTCYEHAANCYTHAFLIVPAIVGSALLHRLSDDCWEKITAWIYGMGLCALFIASTVFHIVSWKKSHLRTAEHCFHMCDRMVIYFFIAASYAPWLNLRELGPLASHMRWFIWLMAAGGTIYVFLYHEKYKVVELFFYLTMGFSPALVVTSMNNTDGLQELACGGLIYCLGVVFFKSDGIIPFAHAIWHLFVATAAAVHYYAIWKYLYRSPTDFMRHL

SEQ ID NO: 317 - DNA, 4695 bp, Homo sapien
gggggagggaaacggagcagtaacaagtatcccagagggtgctgctgaggcgacgatggccgaggggcccgaggaagcccgaggccaccctcccgggcaggacgatggcgggggggaccacgagcccgtcccttccctgagaggccctcctaccaccgccgtcccatgcccccgcgacgacccccaggccgaaccccaggccccgggccggcccacagccccgggcctcgcggctgccgccgcagccgacaaattggagccgccgcgcgagctcaggaagcgcggggaggcggcctccggctccggtgcagagctgcaggagcaggcgggctgcgaggcgcccgaagccgcggcgccacgagagagaccagctcggctgagcgcccgcgagtactcccggcaagtgcacgagtggctgtggcagtcctactgcggctacctcacctggcacagcggcctggccgccttcccagcctactgcagcccccagccctccccgcaaagcttcccttcgggcggcgctgcagtcccccaggccgcggcgccgccgcccccgcagctgggctattacaaccccttctacttcctgagccccggggccgcggggcctgacccgcggacagctgccggcatcagcacccctgctccagtcgcgggcctgggaccccgggctcctcacgtgcaggcgtcggtccgggccactccagtgacgagggtaggatccgcagccccttcgcgaagcccgagcgagaccgggcgacaggcaggcagagaatatgttattccatccttggcccacagatttatggcagagatggtggatttctttattctcttctttataaaagcaaccattgtcttaagcattatgcacctcagtgggataaaggatatctctaagtttgctatgcattatataatagaagaaatagatgaagacacatcaatggaagacttgcagaaaatgatggttgtggcacttatatacagattattagtttgtttctatgagataatttgcatttggggagcaggtggagctaccccagggaagttcctgctggggcttcgagttgtgacatgtgatacatcagtgcttattgcaccaagtcgggttttagtgattccttcctcaaatgttagcattacaacgtccactatccgagctttgatcaagaatttttcaattgcttcttttttccctgctttcatcacactgctgttttttcagcataatcgaacagcttatgacattgtagcaggaaccattgtggtaaaaagaaatggggtcagatgatgccccccaaaaccctgatttccacacactaagactaaattatgtatcaaggccatcagtatccctgggttacactaattgatgatttagaaattaaagcagtcactccagtgtgatgcaggtgactactctgaaagtattgattatacttgaatgccaaagaacttgtccagaagaaaaacctgttaaattcaagtattaaaatttttagatcaaaaaggcaaatgattttataaacaatggacaatatatactttcttaagatctaaggtactttcttaagatctaagaatttgctgaaagcattttcagctttgaaatctccaaatgaaactttaaaatttattttggtttatcccaaaataatggaaaatgtccagttgtgttttgtaaacacctatgtaactcatcttttagtttacacttcctggggaaattgtctttggtgtttagaggagggaatgagaacacaaattggataatccactgtctcccatcccaggaggtggtgagttggctacaagagaaagggacaagtgaggcaggcctagcagttcccttacctgaagttttcaaatccatactgcagttccctctcgtaatgatgtaactttacaactattcttaatgcttgaacatgtatttaggggcaagtttctcatgatgatgaaaaagtatcaagtcatattgctatgttaattggtttttttttttaaaaggtaagttagtgattactgttaatggtgggggagtaagttttcactgtaaattgaacttataatttatgtgcaagtgttttcagtgccctgaatcaaactataaatgtggggagaaatcacctccatcaaacagttgcatatttactgtaaaagtattcccagtatgtgtgcagcatgaagaaagtattagtgcttctcagtgttctcagtgtaaattctatttatatacagcatattcacatactactttccttatattttatatagttctatgactgttgaaacatcaaggagttaaaaaaatcttaatatttcatgattaactctaagtactattaatagcttgcgaaatattagcaattttcccattatggactatctctctaaagcaagagagactagcattcccagacatcattctagggtctttaagctcattttgggtctgctaaagtttggggggaaatgttacgcaaagtgatactgtgtatgttgccattttgctttattcttctgttgaagcaaaattgtggggttttattatgtgtgtgtgcttttcctagatgtcccagttagctgtgctgagatatacctgtactatttatggtttaagttttgattcttaggtattttctccagctctgacattgttttccaaagacacactaaactgcattgcacagttcaaaatttgattacttaagggatcaatctaggtggtgttcttggtcttaaatttaacagcaaacacagcacatatctattatcactatattaattttcaaaggtttttctgtgacgtttaaaactgtgacaacagatattcacatttgattatagaaacttaatgtctattaataattttagtacaaaatttcataaaccgtgtttttcaaaataagtttatgtcaaatccagcttcccagaaacactaataattaagtacatcaatgtactaaataaatcattcagttgcacccatggggaagattgtgttactgcccttcacagtgaaaaaaagaaaaatctttcatttttaaaattaggagatgttacgtaacttggcactttagtagtgtatacactagcattagtttatacaccacttttgccgctggggattcaagttgaaatgtccctcaatcatataggtctggaatacatctttcattcataatttctgctcagataattgaatagtttgccatcgagattattttcatttatactataaaacaaaagcaaactagtccagtttaattttttgtacttagaatattgcacattttctatatatgagttattcagattagtatctatgtaggttcagtcagatccaaccatggattcgaggtattatactgtataaccctacaaaatacatagaagtattatttgccttcataatagaacccaagagtctgtttcaatttatgaattcagtatttgcaccgagattttgattcccaaagtttggaaaaaaatgacaaaacaacgagggaagaaggaaccagaccttagtgccacatatttttctcttggggttgtaaggtagtctcctgctttccagaacactttattatatttcacttatagacctgattttctgtgtcaaagtataattctcatgctgaagctgtagcctaaaaagccaaaagaaagttgtcttcattgtacaaacatattcatcactttaacaataagggaacaaaatttagtattcaagctgagtgagaatactggttcaatggacatgtccctaagataaaccagaattggcagttaatttaggcgtctagaaaatctcagttcccaccagtaaaattatcctgagtagctaatgcaccttgagaaaaatctggcatactgaataagtaacattaacttgggagccaagagctgggtaagccttacctttagactactctgtgactacagaaataaagccagcacttttggaactaataagccttcacttgtcagtatcataaagagtattgcccaactgaactttgctcccactggtttaatagttacttatttctgcctaagcactcaccttccgattttacccaagtatatatataggatagaaaaaaatgcattatatttgagagctcacttcgcccgaattacaaaatgagtgtttttagattcaagtgacggtaaaaggatttgttcccttcagtgacttgagtgttttagttatgcataagtatttctagcaaaggaagggtagaaaggaattgaaaattaatttacactagttgctacttgggaataaagggctttttgaggggggtatggatattaaatgttttcgttatatacttatccctattaaaacaggcagttgtttctttgaatatgcctaaataacagtattcttaaaatctgacagacaagtaacatgtcaattacttgatattccttgtctccagtaccacaggccactcttgacatcccatgtttgcctggataaagttcctcatttcaaacagtatacatacttctttgcagttcattatagtaaggcttaacctgtaaacagtatctgatggcccacctataaataaaattcagcattctatttttaataatttgtatgccaccaatttgtattatttgtctcaataaatacttagtcatcgatgcaaaaaaaaaaaaaaaaaaaaaaaa

SEQ ID NO: 318 - protein, 413 aa, Homo sapien
MAEGPEEARGHPPGQDDGGGDHEPVPSLRGPPTTAVPCPRDDPQAEPQAPGRPTAPGLAAAAAADKLEPPRELRKRGEAASGSGAELQEQAGCEAPEAAAPRERPARLSAREYSRQVHEWLWQSYCGYLTWHSGLAAFPAYCSPQPSPQSFPSGGAAVPQAAAPPPPQLGYYNPFYFLSPGAAGPDPRTAAGISTPAPVAGLGPRAPHVQASVRATPVTRVGSAAPSRSPSETGRQAGREYVIPSLAHRFMAEMVDFFILFFIKATIVLSIMHLSGIKDISKFAMHYIIEEIDEDTSMEDLQKMMVVALIYRLLVCFYEIICIWGAGGATPGKFLLGLRVVTCDTSVLIAPSRVLVIPSSNVSITTSTIRALIKNFSIASFFPAFITLLFFQHNRTAYDIVAGTIVVKRNGVR

SEQ ID NO: 319 - DNA, 6905 bp, Homo sapien
ggtaatgcttaaacttcctgcctcttttgcctctacaggaaagaagaaagaacacaagaaagtgaagtccactagggatattgttcctttttctgaacttggaactactccctctggtggtggattttttcagggtatttcttttcctgaaatctccacccgtcctcctttgggcagtaccgaactacaggcagctaagaaagtacatacttctaagggagacctacctagggagcctcttgttgccacaaacttgcctggcaggggacagttgcagaagttagcctctgaaaggaatttgtttatttcatgcaagtctagccatgataggtgtttagagaaaagttcttcgtcatcttctcagcctgaacacagtgccatgttggtctctactgcagcttctccttcactgattaaagaaaccaccactggttactataaagacatagtagaaaatatttgcggtagagagaaaagtggaattcaaccattatgtcctgagaggtcccatatttcagatcaatcgcctctctccagtaaaaggaaagcactagaagagtctgagagctcacaactaatttctccgccacttgcccaggcaatcagagattatgtcaattctctgttggtccagggtggggtaggtagtttgcctggaacttctaactctatgcccccactggatgtagaaaacatacagaagagaattgatcagtctaagtttcaagaaactgaattcctgtctcctccaagaaaagtccctagactgagtgagaagtcagtggaggaaagggattcaggttcctttgtggcatttcagaacatacctggatccgaactgatgtcttcttttgccaaaactgttgtctctcattcactcactaccttaggtctagaagtggctaagcaatcacagcatgataaaatagatgcctcagaactatcttttcccttccatgaatctattttaaaagtaattgaagaagaatggcagcaagttgacaggcagctgccttcactggcatgcaaatatccagtttcttccagggaggcaacacagatattatcagttccaaaagtagatgatgaaatcctagggtttatttctgaagccactccactaggaggtattcaagcagcctccactgagtcttgcaatcagcagttggacttagcactctgtagagcatatgaagctgcagcatcagcattgcagattgcaactcacactgcctttgtagctaaggctatgcaggcagacattagtgaagctgcacagattcttagctcagatcctagtcgtacccaccaagcgcttgggattctgagcaaaacatatgatgcagcctcatatatttgtgaagctgcatttgatgaagtgaagatggctgcccataccatgggaaatgccactgtaggtcgtcgatacctctggctgaaggattgcaaaattaatttagcttctaagaataagctggcttccactccctttaaaggtggaacattatttggaggagaagtatgcaaagtaattaaaaagcgtggaaataaacactagtaaaattaaggacaaaaagacatctatcttatctttcaggtactttatgccaacattttcttttctgttaaggttgttttagtttccagatagggctaattacaaaatgttaagcttctacccatcaaattacagtataaaagtaattgcctgtgtagaactacttgtcttttctaaagatttgcgtagataggaagcctggtacaaacaatttaacgctttctagatcacatattagtctctaagttgttttctgtttcctgctttacttatgtttttacaattctccaaaactaagaaaattctaattaggatataaggagtatttactgttcaatagaataatatgcatcctcctttatacctaggacagaattaaacatttgttacacattcagaacagtgatgttgttctttttgatacttttatctcagtatcttttcacgttccataacttgtccatatttttgctcatattttcttacttttctttgttatttattcatgtctgcaacatcaatcatagtagtctagatcaatgcaactcaaagcaccagtctacaaactgttacttatccacaggcaagataagcatgcacaagaatttaaatctagagatactttttaggtcaatgacaggatttgattttttagcaaaattttattaatagctaaagcaatgtattgatttacactctgatgcaagtaatttatctcttcattgactggtagcaaccaattcatggaccagtaccatggaccacactttgagaaacacttctttggataataatagatatcctgggatagtgcatgttcaccatctattttgtcagataatggggccttttaaaaaataatactttgctttcatgatatattgtattttgtggaaagttaagtttagcaatatagactctaaaagcaaattaaatttttttaagccataagaaattatactatatcccagtatctgtatgtctgtataaagcagtgtattatcatgttttcatttctgtgattgtaagttaagagtcttaactgcagaggtattgtggaaagtagtagccttaagcataataaaatatggtctcttgggtactccctctggccattaccacattcttagattatatgtgtccatctttgcagctttctgagagtaattttatttgttgtcttctgaaatgtacatgtatacatgtacctactgagtgctatgtgatttttaaaaatgtattactgtagaatgcttctgcaaattcaataaagttgttaaatttgaacagtgttgtgtggtctccagaaacatgttgttctgtgtgctttattcttggagttgcaacaagttaaatatttgtatatgaacaccccttttccatttcatcattgaaactcactttgacatttcagtggtataattgaaaatattctgattatggtatggtttttcttctgtttgaggaccatgtttttattgactgttggaatctaaatttataagaggaattaatctgtaaccagataccttattcgtttaaccgatttctattccactactaatggttttttttactttgtgctttctagttcttagattctgagttaacaaagcataaaatagattttatattgctgggggttgtaccaaacatagatacattgacagatccattgatagaagtgttgggagatggacttgaaatcttagtcctaaataaagactgaactgtttaaactaacttgataaaaatcactgttcgtttttgggaacctgcaagtattaaatagattctgtactaactagtattaacactggaaagttagcaagacacatatagatgtcttgaccactttttcacacaagttcagagttcatgtaaaactttagaattgacttcctttctgtctcttcagtaagaaagtaatctaacttaaatttttggtagtagaagttttagaaataacaactgactaattttgctataccatgataaatgtctacaaaaagggatttttttttttttgaaatgaagtttcgctcttgtccccaaagctggagtgcaatggtgtgatctcagctcgctgcaacctccgcctcccaggttcaagcaattctcctgccttagcctcctgagtagctgggattacaggtgtctgccaccaaccctggctaatgtttgtatttttagtagagacggggtttcaccatgttggccaggatggtcttaagctgacctcaggtgatccgcccacctcggccttccaaagtgctgggattacaagcgtgagccaccatgccctgccagggatgttaactaaaatcagtcttttcaaaacctagatcttcaaatgatgatgaatttaagactaggagactggaatattgaagcctattaaaaaatacatatccttgcgttgttaggttaataactatcatggtgacaagtgtataagtattggcttcttttcaaagaaatgttatttttattataaggactgggacgagaagtgacctgtgattggtcgtatttttctgtgaacaagattccttctttacctgagttgtacctaggttttttataactacatcaaaaaagcttttatattgtacttattaatgttatggcagttacttatagaagcttggtactatatggatttttttcatttttaaactttcccttctatgttccaaattttaatttagtaagtcaacctttgctgtacagtagtagtatactgtatggacaaaacaatggtaacaattgtgttattttaaatggcctttttccacatctaaattgttcttactgaaaagctttcgtgggagcattttgaactcacttcatgttcaaagctatgagtcccagataaaggaaaggagaataggtaggaagaagtggttgtcagatgaaagggtaagggagataagcaaaaatgggataaataatgaaacagttttcaagacaaattgcagttaaacaattttggactagtgaggtattaccagtagacttgtttttcaccttttaatgtgcctaaaaccagggttcccgattaatattaggataacatcatcatttattgagtgtttcagagagtaatggtttctccaatgttatttccagactctaaaatagagctcaagcttgagaagagagaaccactaaagggcagagcaaagactccagtaacactcaagcaaagaagagttgagcacaatcaggtatctttagttttattaccaccgtgtacaggtataaataacctcctgacaacactaatccatgttttagcctttaatggttgacacccagattccagcacgctcaataaacttaattctgttgttaaatgatactaaaaatctaaactttgtgggttttgtcagtagtgtagcctgtgattacagcaaaagcaaatttttaatgtctcatttgtgtttgagtctgtgctagatgtagttcaaagccagttatatggtgttttgaaagaaatattttaaaaggtggaaatatctagacacttttgatacaatttctttaaaaggcaatggaagggttttatatttgtgtctttgtctctagatttctgactttgattttatgtttgcctgtcttgtcttctgcgattctttcctaaactcagaagctagtctggtcctaagactacagttttctttccttatttcagatgaaaatttaccttttctattgtgggagaggcgtttcagtttttcaaaagggaaatgtaggaaactaaggagaaaataagcataggtataaatgaacagagaacaaattattgactaacctagtattgtttacagagaacaaattattgactaacctagtattgtttacagagaacaaattattgactaacctagtattgtttacagagaacaaattattgactaatgcagcattgatttggctgatgctttataagacagctattcctagagtcattttccttacccctgctatgtctagctggatgatttgtctagttggttatcttttccatctcctatttgtcactttgtgtgtttgtttgtgacggagttttgctcttgtcacccgggctggagtgcagtggcgtgatcccatctcattgcaacctccaccctgctgggctcaagcgattctcctgcctcagcctcccaagtagctgggattacaggcacatgccaccacgctcagctaatttttgtatttttagtagagacggggtttcaccgtgttggccaggctggtctcaaactcctgacctcaggtgatccacctgcattggcctccgaaagtgctgggattacaggtgtgagccaccgcgcccagcctgtttgtcgttttaaaatcaaatccttagaggaattattcttgattccttaaggcaagtcagtctctctcttcatttgatgtagttgataagttgaatttcagaacgatttgttagaaatgagctttgtgacaagaacatacagagcattgaatgaatgaagactttgttaacatagaaccaaatactggaatacatgttttattgcccttttatgtagtagtcctaacaaatagcttcaggagcatgctgaagaataaggaaataggccgggcgcagtggctcacgcctgtaatcccagcactttgggaggccgaggcgggcggatcacctgaggtccggagttcgagacgagcctgaccaacatggagaaaccctgtctctactaaaaatacaaaattagccaggcatggtggtgcatgcctgtaatcctagctactccggaggctgaggcaggagaatcgcttgaaccttggaggcggaggttgctgtgagccgagatcgcgccattgcactctagcctgggcaacaagagcgaaactctgtctcaaaaataaataaataaataaataaataataaagatggtctaagggataattgagttggaggaatctaaactgaggagcagaataaatagtcaaaggagtgtaggtttagatgacaggcagaattagacagtggctttattgcagaaaatttaaaacatgtagaagagtggagggaagagtttaatgaccctccagtcatagatgtgccacagttgtcagtgttttaccagtttggtttcatcaccccacaccctccagctttttaaattactttttttttttttttttttttgagacagaatctcactctgtcgcccaggttggagtgcagtggcacaatctcggctcacttgcaacctccgcctcctgggttcaagcagttctcctgcttcagcctcctgagtagctgggattacaggttcccgccaccatgcccagctagtttttgaattc

SEQ ID NO: 320 - DNA, 4833 bp, Homo sapien
gccatttcctcctcttgttttcactccggattctccatgttggacccaaactgaggagcccggagctgccgctgggggatcggggccgggggcacccgggggagccgctgcccgggccgcccgccctttgtacaggccgcctcccttcccggtccggggaggaaacgagaggggggatgtgaacagctgtggaagtcggagtctcgggagccggagcgggcccccgcccaggccccccagcccagcccagcccgcgcgcccgcccgtcctcccgtccagccagcccgggcccgcgggattgttagatggaacacggctccatcatcacccaggcgcggagggaagacgccctggtgctcaccaagcaaggcctggtctccaagtcctctcctaagaagcctcgtggacgtaacatcttcaaggcccttttctgctgttttcgcgcccagcatgttggccagtcaagttcctccactgagctcgctgcgtataaggaggaagcaaacaccattgctaagtcggatctgctccagtgtctccagtaccagttctaccagatcccagggacctgcctgctcccagaggtgacagaggaagatcaaggaaggatctgtgtggtcattgacctcgatgaaacccttgtgcatagctcctttaagccaatcaacaatgctgacttcatagtgcctatagagattgaggggaccactcaccaggtgtatgtgctcaagaggccttatgtggatgagttcctgagacgcatgggggaactctttgaatgtgttctcttcactgccagcctggccaagtatgccgaccctgtgacagacctgctggaccggtgtggggtgttccgggcccgcctattccgtgagtcttgcgtgttccaccagggctgctacgtcaaggacctcagccgcctggggagggacctgagaaagaccctcatcctggacaactcgcctgcttcttacatattccaccccgagaatgcagtgcctgtgcagtcctggtttgatgacatggcagacactgagttgctgaacctgatcccaatctttgaggagctgagcggagcagaggacgtctacaccagccttggggcagctgcgggccccttagcctgccctgcttccaagcgacggccatcccagtaggggactttcccacactgtgcctttacgatcagcgtgacagagtagaagctggagtgcctcaccacacggcccggaaacagcgggaagtaactggaaagagctttaggacagcttagatgccgagtgggcgaatgccagaccaatgatacccagagctacctgccgccaacttgttgagatgtgtgtttgactgtgagagagtgtgtgtttgtgtgtgtgttttgccatgaactgtggccccagtgtatagtgtttcagtgggggagaagctgaaagaccaagactcttcccaagttagcttgtctcctctcctgtcaccctaagagccactgagttgtgtagggatgaaractattgaagactccattgccaaaccatggcctttcctcagtgttgtaaggcctatgccaaggataaaggaagggtatgcctttgggtactccaggcatacacctttctgaaatccttctccagccagctgctgcagacaaaagatcacatttctgggaagatgagaacttgtttccagaccagcatccagtggccatcaggtcttgtggcccaaaggctatgcttgcctccggctgagtgcctgggataggccttttctatgtctccccaaggctggggtgctgagcctgccttcctcaccacctagccatagtctcaaacctgtggggaaggaggttttctccctgcccgggaagaggacagataactgatttccgttcttttgactgtgttttaaaattctctttctaaacacagagtgttgggcctggtttgtttctgacaaagttacagtcctgggcctgtaatgaatgtcggcggcgctggggttgcagggaaaagacaaatcctcaaagcgtggacgtgtgtccccatggcttgtggatcagctaagctcgggatcatttccataagtctgcttttcagggattctctgctggtgctggtgcaaggacttctgttccaaaggctgggaaaaactaagctgtcccagcccctcccatttcttgggcagggctcttttcctgttgtgtcttcccccagggcctgtcctgtaccgagctctgtctgttccagcctacatccttcctgggtgttgcttttcctcttaagggcctcagaactcttgctcttcctggggtgagggggaatgagtgttcttgacatgtgacagcctaatgcgcatgctttctgcctctggtaacaggagtgagtgagcccctcagacctgcactctgggtgtctcctgcttacaaaggttcttaatagtgaatgctttaaaattaaagtcatcacgaaatggaagttttcccagggtggaaaataagaggaagtgctgctgtaattgggagcacaaggggcctcccaaaaaggagccccacctcagcatcactgccttaatcgtggcctccctggggtgggtggggttctctcctccctccctccctcctcctggggtgggagggcgctcctgttcccatctctgtgttccctggaggcaggtatcacaaagcatttgtgaattgctttaggtgcagggacaccacccactcaggactcttccccatcatcccttccattgccacaccctagatccagcctcaggaactaacaagttktgagaaaagcaggtggtagagcagcagcttcgtgctctcagcggtggctggctggcatttttctctagcgttgtggtgccaccttcccttcttgtcccaaggttataaggccttgtctttctctttggaatcataaagtggaacagagtccccagaactcatgtgghcatttccgacagcatcactccccggtgcctatggggtcccggtgtacctaaagggagaaggaccccatgtgctagccagaaatatactgtctcttgaaggaaagcaggagctcagactcttagagccagctgtggcttcggacccaaggcctgacctaggctgctatcctaatattggaggaggggcctctcttccaagccccaccctaagggttagcccttggacaaatcttgtgccgtctaggcccagccaggcttttctgactaaataagcaataagaggctctaagctgactgagttgcaaggaccctttccgccctcccttggatctccatgtttctccagatggcggaagagcatgtgccaccccctttcctaacagacttgtccaagtgcttggcgtgggacccatgaccaaagcccaggatggcttggtgggagtgtccctgctgcatctgcatgaagcccctgctttttaggcctcactcccatcagaaccctgcctgcccacctgcaactcccccccaacaatgccattcccacttgccccagagaagctactcggccaaacctagccagggtctgttcttgtggaccagagccagcctagtcattatttgctgtcgggtttccagtttcaccgtgtgttagggtgagggatgattgtaaaatttgctcctcaaaggaatcaggccagactcaattttgggagggcaagacagggaggaggccgcttcatcccagactctcttctagggcttcccaccatcagcccctcccacttgagactggtctttgggaggcaataggccaccatgcctggtcagcaccaattcaagccatgccaggaatctgcctacctgccaggttcagttcttttaaggtgcctcttcagggacacagtgtgtctctctgattgggcttctaaatcaaaagcctgatgttcgtgtccctctcatagggggagctttggacacaggaccagtttggaaaagggtcaggtaagggtttccactctgcacattgtagagggaacactctgtaggcccatgggtcccttactagagaggttgagtgaatttgccttcagttaacatgggaccttctgtttagcttcctcttgcttcccaaagattttaagcattttgtaaatgtataaactcacctctggtaacagtggcccagacgctgctttgtgctaaaagcatgggaaatgtaaaggcagtctttctctgggaaatggatgctattctattctgctgcccctacctgttcctgaggcctcatttagaaagaaaatcccctcagaaggctgtctggcacccagtgtcctagccaggccaagtatatgagaaaggtaagtccattttccccttcaggtcctcagtggattacttaaccactgctgtccctcggtccctttttcctaaacgggtttagttctgtcttttttctccttttttctaaatgctggtaaatatttacattcagccagggaagaggaggccagaggtcgggccagctgccccattcttttaacgttgtagggcctgcccatggagcggaccctcctctttgggcctcgtgagcttttttgcttatcatgttccatttcgtgccgctttcccccttcaagatgccatttggagggtaggggatctgcttcccactgtgactgggctatgggattctgactaccttgcttacagattcatggtttgataaatttgttgtattccaaaacttgaaatgcaggacgccattaagtgtctgtttatatttttggaatatttgtattacttacaattaattaataaaagtgggtttaaaaaacctttccaggaaaaaaaaaaaaaaaaaaaaaaaaaaaaaaaaaaaaa

SEQ ID NO: 321 - protein, 283 aa, Homo sapien
MEHGSIITQARREDALVLTKQGLVSKSSPKKPRGRNIFKALFCCFRAQHVGQSSSSTELAAYKEEANTIAKSDLLQCLQYQFYQIPGTCLLPEVTEEDQGRICVVIDLDETLVHSSFKPINNADFIVPIEIEGTTHQVYVLKRPYVDEFLRRMGELFECVLFTASLAKYADPVTDLLDRCGVFRARLFRESCVFHQGCYVKDLSRLGRDLRKTLILDNSPASYIFHPENAVPVQSWFDDMADTELLNLIPIFEELSGAEDVYTSLGAAAGPLACPASKRRPSQ

SEQ ID NO: 322 - DNA, 1764 bp, Homo sapien
cgtctggttcaggggctagaaaagagcgtcgatgccggcggcagtgatgagtcctaggaggcgctggctctttggcggctcggaggagcggctgctgctgctgctgctgctgctggtggcccctttgcagatgtattgctgtccttgaatattagcccatttgaaaacgcctgggaagttcagccatcagtatgtccaagtacaaacttattatgttaagacatggagagggtgcttggaataaggagaaccgtttttgtagctgggtggatcagaaactcaacagcgaaggaatggaggaagctcggaactgtgggaagcaactcaaagcgttaaactttgagtttgatcttgtattcacatctgtccttaatcggtccattcacacagcctggctgatcctggaagagctaggccaggaatgggtgcctgtggaaagctcctggcgtctaaatgagcgtcactatggggccttgatcggtctcaacagggagcagatggctttgaatcatggtgaagaacaagtgaggctctggagaagaagctacaatgtaaccccgcctcccattgaggagtctcatccttactaccaagaaatctacaacgaccggaggtataaagtatgcgatgtgcccttggatcaactgccacggtcggaaagcttaaaggatgttctggagagactccttccctattggaatgaaaggattgctcccgaagtattacgtggcaaaaccattctgatatctgctcatggaaatagcagtagggcactcctaaaacacctggaaggtatctcagatgaagacatcatcaacattactcttcctactggagtccccattcttctggaattggatgaaaacctgcgtgctgttgggcctcatcagttcctgggtgaccaagaggcgatccaagcagccattaagaaagtagaagatcaaggaaaagtgaaacaagctaaaaaatagtctttctcaactgttggctaagaagaaatgcaaaagaagtggcataggagtgtgttatgggtgctgaactctctctctttttccccgattttccagagctaggctgtggagtagagtttgtataggtaactaggtaacttattgtggcccagataaggctttaggatgcctcagtgcttatgtcatagccttatgagttagctttcttgctagccccctagtcggtcaccaaactagtaactagtggggcttaatgaaggtcataagtttctgagatgggagagcaacaagtagagatgaagttaaaggtatttatcattcaagaaatcattattgagtcaccattgacaggcactattctaatcagtagttcactttaatatttaataagattttctgggataacagtaagggatattagataatataccgtatgtatttattactagtcttttcctctaggaaaagggatactttgataattaaggccagaggcccattagttgagaaagtcacagatatatttctccaagaaagccaacaaccaccaccacaatgacagaaatgacaacaaggccctttaacttgtcttctagtttagagacatccttcatttgacatttagtagaattcctctttggccacaagaataagcagcaaataaacaactatggctgttgaggttctcattttggtttgttttaattttttgaactttgggtacctgtaattagtttaaaaataaagttcctgataataaagtgactgaaaatggcaaaaaaaaaaaaaaaaa

SEQ ID NO: 323 - protein, 259 aa, Homo sapien
MSKYKLIMLRHGEGAWNKENRFCSWVDQKLNSEGMEEARNCGKQLKALNFEFDLVFTSVLNRSIHTAWLILEELGQEWVPVESSWRLNERHYGALIGLNREQMALNHGEEQVRLWRRSYNVTPPPIEESHPYYQEIYNDRRYKVCDVPLDQLPRSESLKDVLERLLPYWNERIAPEVLRGKTILISAHGNSSRALLKHLEGISDEDIINITLPTGVPILLELDENLRAVGPHQFLGDQEAIQAAIKKVEDQGKVKQAKK

SEQ ID NO: 324 - DNA, 6906 bp, Homo sapien
ggcgcgggcggcctggagccccgggagcggcgcgcgcggtcccggcccagccggctctcctggcctcgcgctgcacattctctcctggcggcggcgccacctgcagtagcgttcgcccgaacatggcgacacggagcagcaggagggagtcgcgactcccgttcctattcaccctggtcgcactgctgccgcccggagctctctgcgaagtctggacgcagaggctgcacggcggcagcgcgcccttgccccaggaccggggcttcctcgtggtgcagggcgacccgcgcgagctgcggctgtgggcgcgcggggatgccaggggggcgagccgcgcggacgagaagccgctccggaggaaacggagcgctgccctgcagcccgagcccatcaaggtgtacggacaggttagtctgaatgattcccacaatcagatggtggtgcactgggctggagagaaaagcaacgtgatcgtggccttggcccgagatagcctggcattggcgaggcccaagagcagtgatgtgtacgtgtcttacgactatggaaaatcattcaagaaaatttcagacaagttaaactttggcttgggaaataggagtgaagctgttatcgcccagttctaccacagccctgcggacaacaagcggtacatctttgcagacgcttatgcccagtacctctggatcacgtttgacttctgcaacactcttcaaggcttttccatcccatttcgggcagctgatctcctcctacacagtaaggcctccaaccttctcttgggctttgacaggtcccaccccaacaagcagctgtggaagtcagatgactttggccagacctggatcatgattcaggaacatgtcaagtccttttcttggggaattgatccctatgacaaaccaaataccatctacattgaacgacacgaaccctctggctactccactgtcttccgaagtacagatttcttccagtcccgggaaaaccaggaagtgatccttgaggaagtgagagattttcagcttcgggacaagtacatgtttgctacaaaggtggtgcatctcttgggcagtgaacagcagtcttctgtccagctctgggtctcctttggccggaagcccatgagagcagcccagtttgtcacaagacatcctattaatgaatattacatcgcagatgcctccgaggaccaggtgtttgtgtgtgtcagccacagtaacaaccgcaccaatttatacatctcagaggcagaggggctgaagttctccctgtccttggagaacgtgctctattacagcccaggaggggccggcagtgacaccttggtgaggtattttgcaaatgaaccatttgctgacttccaccgagtggaaggattgcaaggagtctacattgctactctgattaatggttctatgaatgaggagaacatgagatcggtcatcacctttgacaaagggggaacctgggagtttcttcaggctccagccttcacgggatatggagagaaaatcaattgtgagctttcccagggctgttcccttcatctggctcagcgcctcagtcagctcctcaacctccagctccggagaatgcccatcctgtccaaggagtcggctccaggcctcatcatcgccactggctcagtgggaaagaacttggctagcaagacaaacgtgtacatctctagcagtgctggagccaggtggcgagaggcacttcctggacctcactactacacatggggagaccacggcggaatcatcacggccattgcccagggcatggaaaccaacgagctaaaatacagtaccaatgaaggggagacctggaaaacattcatcttctctgagaagccagtgtttgtgtatggcctcctcacagaacctggggagaagagcactgtcttcaccatctttggctcgaacaaagagaatgtccacagctggctgatcctccaggtcaatgccacggatgccttgggagttccctgcacagagaatgactacaagctgtggtcaccatctgatgagcgggggaatgagtgtttgctgggacacaagactgttttcaaacggcggaccccccatgccacatgcttcaatggagaggactttgacaggccggtggtcgtgtccaactgctcctgcacccgggaggactatgagtgtgacttcggtttcaagatgagtgaagatttgtcattagaggtttgtgttccagatccggaattttctggaaagtcatactcccctcctgtgccttgccctgtgggttctacttacaggagaacgagaggctaccggaagatttctggggacacttgtagcggaggagatgttgaagcgcgactggaaggagagctggtcccctgtcccctggcagaagagaacgagttcattctgtatgctgtgaggaaatccatctaccgctatgacctggcctcgggagccaccgagcagttgcctctcaccgggctacgggcagcagtggccctggactttgactatgagcacaactgtttgtattggtccgacctggccttggacgtcatccagcgcctctgtttgaatggaagcacagggcaagaggtgatcatcaattctggcctggagacagtagaagctttggcttttgaacccctcagccagctgctttactgggtagatgcaggcttcaaaaagattgaggtagctaatccagatggcgacttccgactcacaatcgtcaattcctctgtgcttgatcgtcccagggctctggtcctcgtgccccaagagggggtgatgttctggacagactggggagacctgaagcctgggatttatcggagcaatatggatggttctgctgcctatcacctggtgtctgaggatgtgaagtggcccaatggcatctctgtggacgaccagtggatttactggacggatgcctacctggagtgcatagagcggatcacgttcagtggccagcagcgctctgtcattctggacaacctcccgcacccctatgccattgctgtctttaagaatgaaatctactgggatgactggtcacagctcagcatattccgagcttccaaatacagtgggtcccagatggagattctggcaaaccagctcacggggctcatggacatgaagattttctacaaggggaagaacactggaagcaatgcctgtgtgcccaggccatgcagcctgctgtgcctgcccaaggccaacaacagtagaagctgcaggtgtccagaggatgtgtccagcagtgtgcttccatcaggggacctgatgtgtgactgccctcagggctatcagctcaagaacaatacctgtgtcaaagaagagaacacctgtcttcgcaaccagtatcgctgcagcaacgggaactgtatcaacagcatttggtggtgtgactttgacaacgactgtggagacatgagcgatgagagaaactgccctaccaccatctgtgacctggacacccagtttcgttgccaggagtctgggacttgtatcccactgtcctataaatgtgaccttgaggatgactgtggagacaacagtgatgaaagtcattgtgaaatgcaccagtgccggagtgacgagtacaactgcagttccggcatgtgcatccgctcctcctgggtatgtgacggggacaacgactgcagggactggtctgatgaagccaactgtaccgccatctatcacacctgtgaggcctccaacttccagtgccgaaacgggcactgcatcccccagcggtgggcgtgtgacggggatacggactgccaggatggttccgatgaggatccagtcaactgtgagaagaagtgcaatggattccgctgcccaaacggcacttgcatcccatccagcaaacattgtgatggtctgcgtgattgctctgatggctccgatgaacagcactgcgagcccctctgtacgcacttcatggactttgtgtgtaagaaccgccagcagtgcctgttccactccatggtctgtgacggaatcatccagtgccgcgacgggtccgatgaggatgcggcgtttgcaggatgctcccaagatcctgagttccacaaggtatgtgatgagttcggtttccagtgtcagaatggagtgtgcatcagtttgatttggaagtgcgacgggatggatgattgcggcgattattctgatgaagccaactgcgaaaaccccacagaagccccaaactgctcccgctacttccagtttcggtgtgagaatggccactgcatccccaacagatggaaatgtgacagggagaacgactgtggggactggtctgatgagaaggattgtggagattcacatattcttcccttctcgactcctgggccctccacgtgtctgcccaattactaccgctgcagcagtgggacctgcgtgatggacacctgggtgtgcgacgggtaccgagattgtgcagatggctctgacgaggaagcctgccccttgcttgcaaacgtcactgctgcctccactcccacccaacttgggcgatgtgaccgatttgagttcgaatgccaccaaccgaagacgtgtattcccaactggaagcgctgtgacggccaccaagattgccaggatggccgggacgaggccaattgccccacacacagcaccttgacttgcatgagcagggagttccagtgcgaggacggggaggcctgcattgtgctctcggagcgctgcgacggcttcctggactgctcggacgagagcgatgaaaaggcctgcagtgatgagttgactgtgtacaaagtacagaatcttcagtggacagctgacttctctggggatgtgactttgacctggatgaggcccaaaaaaatgccctctgcttcttgtgtatataatgtctactacagggtggttggagagagcatatggaagactctggagacccacagcaataagacaaacactgtattaaaagtcttgaaaccagataccacgtatcaggttaaagtacaggttcagtgtctcagcaaggcacacaacaccaatgactttgtgaccctgaggaccccagagggattgccagatgcccctcgaaatctccagctgtcactccccagggaagcagaaggtgtgattgtaggccactgggctcctcccatccacacccatggcctcatccgtgagtacattgtagaatacagcaggagtggttccaagatgtgggcctcccagagggctgctagtaactttacagaaatcaagaacttattggtcaacactctatacaccgtcagagtggctgcggtgactagtcgtggaataggaaactggagcgattctaaatccattaccaccataaaaggaaaagtgatcccaccaccagatatccacattgacagctatggtgaaaattatctaagcttcaccctgaccatggagagtgatatcaaggtgaatggctatgtggtgaaccttttctgggcatttgacacccacaagcaagagaggagaactttgaacttccgaggaagcatattgtcacacaaagttggcaatctgacagctcatacatcctatgagatttctgcctgggccaagactgacttgggggatagccctctggcatttgagcatgttatgaccagaggggttcgcccacctgcacctagcctcaaggccaaagccatcaaccagactgcagtggaatgtacctggaccggcccccggaatgtggtttatggtattttctatgccacgtcctttcttgacctctatcgcaacccgaagagcttgactacttcactccacaacaagacggtcattgtcagtaaggatgagcagtatttgtttctggtccgtgtagtggtaccctaccaggggccatcctctgactacgttgtagtgaagatgatcccggacagcaggcttccaccccgtcacctgcatgtggttcatacgggcaaaacctccgtggtcatcaagtgggaatcaccgtatgactctcctgaccaggacttgttgtatgcaattgcagtcaaagatctcataagaaagactgacaggagctacaaagtaaaatcccgtaacagcactgtggaatacacccttaacaagttggagcctggcgggaaataccacatcattgtccaactggggaacatgagcaaagattccagcataaaaattaccacagtttcattatcagcacctgatgccttaaaaatcataacagaaaatgatcatgttcttctgttttggaaaagcctggctttaaaggaaaagcattttaatgaaagcaggggctatgagatacacatgtttgatagtgccatgaatatcacagcttaccttgggaatactactgacaatttctttaaaatttccaacctgaagatgggtcataattacacgttcaccgtccaagcaagatgcctttttggcaaccagatctgtggggagcctgccatcctgctgtacgatgagctggggtctggtgcagatgcatctgcaacgcaggctgccagatctacggatgttgctgctgtggtggtgcccatcttattcctgatactgctgagcctgggggtggggtttgccatcctgtacacgaagcaccggaggctgcagagcagcttcaccgccttcgccaacagccactacagctccaggctggggtccgcaatcttctcctctggggatgacctgggggaagatgatgaagatgcccctatgataactggattttcagatgacgtccccatggtgatagcctgaaagagctttcctcactagaaaccaaatggtgtaaatattttatttgataaagatagttgatggtttattttaaaagatgcactttgagttgcaatatgttatttttatatgggccaaaaacaaaaaacaaaaaaaaaaa

SEQ ID NO: 325 - protein, 2000 aa, Homo sapien
MATRSSRRESRLPFLFTLVALLPPGALCEVWTQRLHGGSAPLPQDRGFLVVQGDPRELRLWARGDARGASRADEKPLRRKRSAALQPEPIKVYGQVSLNDSHNQMVVHWAGEKSNVIVALARDSLALARPKSSDVYVSYDYGKSFKKISDKLNFGLGNRSEAVIAQFYHSPADNKRYIFADAYAQYLWITFDFCNTLQGFSIPFRAADLLLHSKASNLLLGFDRSHPNKQLWKSDDFGQTWIMIQEHVKSFSWGIDPYDKPNTIYIERHEPSGYSTVFRSTDFFQSRENQEVILEEVRDFQLRDKYMFATKVVHLLGSEQQSSVQLWVSFGRKPMRAAQFVTRHPINEYYIADASEDQVFVCVSHSNNRTNLYISEAEGLKFSLSLENVLYYSPGGAGSDTLVRYFANEPFADFHRVEGLQGVYIATLINGSMNEENMRSVITFDKGGTWEFLQAPAFTGYGEKINCELSQGCSLHLAQRLSQLLNLQLRRMPILSKESAPGLIIATGSVGKNLASKTNVYISSSAGARWREALPGPHYYTWGDHGGIITAIAQGMETNELKYSTNEGETWKTFIFSEKPVFVYGLLTEPGEKSTVFTIFGSNKENVHSWLILQVNATDALGVPCTENDYKLWSPSDERGNECLLGHKTVFKRRTPHATCFNGEDFDRPVVVSNCSCTREDYECDFGFKMSEDLSLEVCVPDPEFSGKSYSPPVPCPVGSTYRRTRGYRKISGDTCSGGDVEARLEGELVPCPLAEENEFILYAVRKSIYRYDLASGATEQLPLTGLRAAVALDFDYEHNCLYWSDLALDVIQRLCLNGSTGQEVIINSGLETVEALAFEPLSQLLYWVDAGFKKIEVANPDGDFRLTIVNSSVLDRPRALVLVPQEGVMFWTDWGDLKPGIYRSNMDGSAAYHLVSEDVKWPNGISVDDQWIYWTDAYLECIERITFSGQQRSVILDNLPHPYAIAVFKNEIYWDDWSQLSIFRASKYSGSQMEILANQLTGLMDMKIFYKGKNTGSNACVPRPCSLLCLPKANNSRSCRCPEDVSSSVLPSGDLMCDCPQGYQLKNNTCVKEENTCLRNQYRCSNGNCINSIWWCDFDNDCGDMSDERNCPTTICDLDTQFRCQESGTCIPLSYKCDLEDDCGDNSDESHCEMHQCRSDEYNCSSGMCIRSSWVCDGDNDCRDWSDEANCTAIYHTCEASNFQCRNGHCIPQRWACDGDTDCQDGSDEDPVNCEKKCNGFRCPNGTCIPSSKHCDGLRDCSDGSDEQHCEPLCTHFMDFVCKNRQQCLFHSMVCDGIIQCRDGSDEDAAFAGCSQDPEFHKVCDEFGFQCQNGVCISLIWKCDGMDDCGDYSDEANCENPTEAPNCSRYFQFRCENGHCIPNRWKCDRENDCGDWSDEKDCGDSHILPFSTPGPSTCLPNYYRCSSGTCVMDTWVCDGYRDCADGSDEEACPLLANVTAASTPTQLGRCDRFEFECHQPKTCIPNWKRCDGHQDCQDGRDEANCPTHSTLTCMSREFQCEDGEACIVLSERCDGFLDCSDESDEKACSDELTVYKVQNLQWTADFSGDVTLTWMRPKKMPSASCVYNVYYRVVGESIWKTLETHSNKTNTVLKVLKPDTTYQVKVQVQCLSKAHNTNDFVTLRTPEGLPDAPRNLQLSLPREAEGVIVGHWAPPIHTHGLIREYIVEYSRSGSKMWASQRAASNFTEIKNLLVNTLYTVRVAAVTSRGIGNWSDSKSITTIKGKVIPPPDIHIDSYGENYLSFTLTMESDIKVNGYVVNLFWAFDTHKQERRTLNFRGSILSHKVGNLTAHTSYEISAWAKTDLGDSPLAFEHVMTRGVRPPAPSLKAKAINQTAVECTWTGPRNVVYGIFYATSFLDLYRNPKSLTTSLHNKTVIVSKDEQYLFLVRVVVPYQGPSSDYVVVKMIPDSRLPPRHLHVVHTGKTSVVIKWESPYDSPDQDLLYAIAVKDLIRKTDRSYKVKSRNSTVEYTLNKLEPGG

SEQ ID NO: 326 - DNA, 4859 bp, Homo sapien
cacgttgggtgacataatggggtttttttaattatagattcacactgcatttattcatcacccctgtcctctcatccataactcaaatttactaccagcaacacaaaatacaaagatgtgtccagtttcactacagctcttcgcgtttacaagtgtcgagcgcttgctttcggaacgcccttgtgattggccgagccaatgccagtgacatcaaccaacttacttttgattggaaggctggttgctgggactgtagcgtttgcaggaagtcacttaactgtttgggagctggaaaaccgaagctgaagttctcttttgccataggaacgagcgcaactgactaggaaagatgtgtcccaaagctccgcaagctggaacgtgagccaggaggcccggaccggccacgggaccgcgaggcactccgaaagtgtgcggctgccccttccctgcctcccagctgttacccttttaaatgtcagtgttcgaggctgtaggggtagcacgaggcagcgaaacggaacagtcggattggccgcacgcctcagttctagacgcacctctccaccgaagccgttctgactggcagggggagaaagtaaacagagttgaatcaccctccccactggccaattggagggggtttggtttgtgacgtgatgggattctgcgaaattgttactgagcaagagaatgccggaacgtgcggaccggccggagcaggggttcagaagccgtcagtggactcgggaaaaagtgtctcttagacctggcgctcggcggggccctcgccacccgcgtcggggtgatcgggtgaatgtcctggggctttggctcgacggcgaggcggccgagggcgtgcacctctcttgcagtttcctctcccagcgcctcgggggcgttttcagtcgaataaacttgcgaccgccacgtgtggcatctttccaagggagccggctcagaggggccggcgcgcccgtcgggggatcgcggccggcgcggggcaggggcggcggctagaggcggcggcgcggcggagcccggggccgtggatgctgcgtgcggaggcgctgccggttacgtaaagatgaggggctgaggtcgcctcggcgctcctgcgagtcggaagcgccccgcgcccccgcccccttggccgccgcgccgtgccgggcgggcgggtcgtcgtccgaggccagggagggcgagccgaacctccgcagccaccgccaagtttgtccgcgccgcctgggctgccgtcgcccgcaccatgtccgcggccgcctacatggacttcgtggctgcccagtgtctggtttccatttcgaaccgcgctgcggtgccggagcatggggtcgctccggacgccgagcggctgcgactacctgagcgcgaggtgaccaaggagcacggtgacccgggggacacctggaaggattactgcacactggtcaccatcgccaagagcttgttggacctgaacaagtaccgacccatccagaccccctccgtgtgcagcgacagtctggaaagtccagatgaggatatgggatccgacagcgacgtgaccaccgaatctgggtcgagtccttcccacagcccggaggagagacaggatcctggcagcgcgcccagcccgctctccctcctccatcctggagtggctgcgaaggggaaacacgcctccgaaaagaggcacaagtgcccctacagtggctgtgggaaagtctatggaaaatcctcccatctcaaagcccattacagagtgcatacaggtgaacggcccttcccctgcacgtggccagactgccttaaaaagttctcccgctcagacgagctgacccgccactaccggacccacactggggaaaagcagttccgctgtccgctgtgtgagaagcgcttcatgaggagtgaccacctcacaaagcacgcccggcggcacaccgagttccaccccagcatgatcaagcgatcgaaaaaggcgctggccaacgctttgtgaggtgctgcccgtggaagccagggagggatggaccccgaaaggacaaaagtactcccaggaaacagacgcgtgaaaactgagccccagaagaggcacacttgacggcacaggaagtcactgctctttggtcaatattctgattttcctctccctgcattgtttttaaaaagcacattgtagcctaagatcaaagtcaacaacactcggtccccttgaagaggcaactctctgaacccgtctctgactgttggagggaaggcaaatgcttttgggttttttggtttttgtttttgtttttttttctccttttatttttttgcgggggagggtagggagtgggtgggggggagggggtaaggccaagactgggtagattttaaagattcaacactggtgtacatatgtccgctgggtgagttgacctgtggcctcgcacagtgattctaggccctttatgcttgctgtctctcagaattgttttcttaccttttaatgtaatgacgagtgtgcttcagtttgtttagcaaaaccactctcttgaatcacgttaacttttgagattaaaaaaaaaaacgccatagcacagctgtctttatgcaagcaagagcacatctactccagcatgatctgtcatctaaagacttgaaaacaaaaaacagttacttatagtcaatgggtaagcagagtctgaatttatactaatcaagacaaacctttgaaaggttacactaagtacagaacttttaaaccttgctttgtatgagttgtactttttgaacataagctgcacttttattttctaatgcagaggatgaataagttaaatacatgctttgaggatagaagcagatgttctgtttggcaccacgttataatctgcttattttacaatatacacgtttccctaagaaatcatgcgcagagatgtgagggcagaatatacacaacagatgctgaaggagaaggagggtagtgttttgcaaaagaaaaagaaaagaaccaacagaattttaactctattaacttttccaaattttcctatgcttttagttaacatcattattgtatcctaatgccactaggggagagagcttttgactctgttgggttttatttgaatgtgtgcataacagtaatgagatctggaaacacctattttttggggaaaaaggtttgttggtctccttcctgtgttcctacaaaactcccactctcaggtgcaagagttatgtagaaggaaagggagctgaaataggaacagaaaaatcaacccctataactagtgaacaccaagggaaaataccacaatgatttcagaggagactctgcaaaatcgtcccttgtggagaatgcaggcaacatggaatactacgaatgaaatcacatcactgtatcttttacatcaatagcctcaccactaatatatcttgtatctaggtgtctataatggctgaaaccactacatccatctatgccatttacctgaaaacttaactgtggcctttatgaggccagaaaagtgaactgagttttgtagttaagacctcaaatgaggggagtcagcagtgatcatgggggaaatgtttacattttttttttcttcagaagtaacgctttctgatgattttatctgatatttaaaacagggagctatggtgcactctagtttatacttgcgctctgaaatgtgtaaacatagggtgcctacctatttcacctgacccatactcgtttctgattcagaatcagtgtgggctcctgcagtgggcgcgggtcacggctgactccaacttccaatacaacagccatcactagcacagtgtttttttgtttaaccaacgtagtgttattagtagttctataaagagaactgcttttaacattagggactgggagcagtccatgggataaaaaggaaagtgttttctcacgagaaaacatgtcaggaaaaataaagaacactttctacctctgtttcagatttttgaaacacttattttaaaccaaattttaatttctgtgtccaaaataagttttaaggacatctgttcttccatacgaaataggttaggctgcctatttctcactgagctcatggaatggttctgcttatgatactctgcacgctgccttttagtgagtgaggagtttggggttgcctagcacttgctaacttgtaaaaagtcatctttccctcacagaaagaaacgaaagaaagcaaagcaaagtcagtgaaagacaatctttatagtttcaggagtaaatctaaatgtggcttttgtcaagcacttagatggatataaatgcagcaacttgttttaaaaaaatgcacatttacttcccaaaaaagttgttacttgccttttcaagtgtgacaaactcacatttgatattctcttatatgttatagtaatgtaacgtataaactcaagcctttttattctttgtgattaaatcctgttttaaaatgtcacaaaacaggaaccagcattctaattagatttactatatcaagatatggttcaaataggactactagagttcattgaacactaaaactatgaaacaattactttttatattaaaaagaccatggatttaacttatgaaaatccaaatgcaggatagtaatttttgtttacttttttaaccaaactgaatttttgaaagactattgcaggtgtttaaaaagaaagaaaagttgttttatctaatactgtaagtagttgtcatattctggaaaatttaatagttttagagttaagatatctcctctctttggttagggaagaagaaagcccttcaccattgtggaatgatgccctggctttaaggtttagctccacatcatgcttctctt

SEQ ID NO: 327 - protein, 244 aa, Homo sapien
MSAAAYMDFVAAQCLVSISNRAAVPEHGVAPDAERLRLPEREVTKEHGDPGDTWKDYCTLVTIAKSLLDLNKYRPIQTPSVCSDSLESPDEDMGSDSDVTTESGSSPSHSPEERQDPGSAPSPLSLLHPGVAAKGKHASEKRHKCPYSGCGKVYGKSSHLKAHYRVHTGERPFPCTWPDCLKKFSRSDELTRHYRTHTGEKQFRCPLCEKRFMRSDHLTKHARRHTEFHPSMIKRSKKALANAL

SEQ ID NO: 328 - DNA, 4859 bp, Homo sapien; identical to SEQ ID NO: 326

SEQ ID NO: 329 - protein, 244 aa, Homo sapien; identical to SEQ ID NO: 327

SEQ ID NO: 330 - DNA, 1750 bp, Homo sapien
caccgcgcaagcgcatcctggcctttcttcagtccccacgtgcgatccttcccggcaactttttcgagaaaaatgcccaaattcaaggcggcccgtggggtggggggtcaggaaaaacatgcgcccctggccgatcagatcctggctgggaatgcggtgcgggcgggggtccgggagaagcggcggggtcgcgggacaggagaagcggaggaagagtatgtggggccccggctgagccgacggattttgcagcaagcacggcagcaacaggaggaactcgaggccgagcatgggactggggacaagcccgcggcgccgcgggaacgcaccacgcggctgggtccaagaatgcctcaggatggatcagatgacgaggacgaggagtggcccaccctggagaaggctgccacaatgacagcagcgggccatcatgcagaggtggttgtggaccctgaggatgagcgtgccatagagatgttcatgaacaagaaccctcctgccaggcgcaccctggctgacatcatcatggagaagctgactgagaagcagacagaggttgagacagtcatgtcagaggtgtcgggcttccctatgccccagctggacccccgggtcctagaagtgtacaggggggtccgggaggtattatctaagtaccgcagtggaaaactgcccaaggcatttaagatcatccctgcactctccaactgggagcaaatcctctacgtcacagagccggaggcctggactgcagctgccatgtaccaggccaccaggatttttgcctctaacctgaaggaacgcatggcccagcgcttctacaaccttgtcctgctccctcgagtacgagatgacgttgctgaatacaaacgactcaacttccatctctacatggctctcaagaaggcccttttcaaacctggagcctggttcaaagggatcctgattccactgtgcgagtctggcacttgtaccctccgggaagccatcattgtgggtagcatcatcaccaagtgctccatccctgtgttgcactccagtgcggccatgctgaaaattgctgagatggaatacagcggtgccaacagcatcttcctgcgactgctgctggataagaagtatgcactgccttaccgggtgctggatgccctagtcttccacttcctggggttccggacagagaagcgtgaactgcctgtgctgtggcaccagtgcctcctgactttggtccagcgctacaaggccgacttggccacagaccagaaagaggccctcttagaactgctccggctgcagccccatccacagctatcgcccgaaatcaggcgtgagcttcagagtgcagtcccccgcgatgtggaagatgttcccatcaccgtggagtgaggaaaacagtcagctgtcctggccaaaggggtttggaaggacaccaagacccccgttggtgactgaagatgacactgagctttaatggctgaagacccagatcagggcagtgacagatcacagggacatctgtggctcccagtccaggacaggaaggactgagggtctggctggttccctcttccattctaggcccttatccctgtttagttctgagagccaacttgagataccatatgctagcattcccagtccccagctggggcttggtgtgagtactttttctatggctattgtgtcaggtcactgtggataaaggcaaagacagatatttattgaaaaaaaaaaaaaaaaaaaaaaaaaa

SEQ ID NO: 331 - protein, 301 aa, Homo sapien
MNKNPPARRTLADIIMEKLTEKQTEVETVMSEVSGFPMPQLDPRVLEVYRGVREVLSKYRSGKLPKAFKIIPALSNWEQILYVTEPEAWTAAAMYQATRIFASNLKERMAQRFYNLVLLPRVRDDVAEYKRLNFHLYMALKKALFKPGAWFKGILIPLCESGTCTLREAIIVGSIITKCSIPVLHSSAAMLKIAEMEYSGANSIFLRLLLDKKYALPYRVLDALVFHFLGFRTEKRELPVLWHQCLLTLVQRYKADLATDQKEALLELLRLQPHPQLSPEIRRELQSAVPRDVEDVPITVE

SEQ ID NO: 332 - DNA, 6030 bp, Homo sapien
gttggcccccgttacttttcctctgggaaatatggcgcacgctgggagaacagggtacgataaccgggagatagtgatgaagtacatccattataagctgtcgcagaggggctacgagtgggatgcgggagatgtgggcgccgcgcccccgggggccgcccccgcgccgggcatcttctcctcgcagcccgggcacacgccccatacagccgcatcccgggacccggtcgccaggacctcgccgctgcagaccccggctgcccccggcgccgccgcggggcctgcgctcagcccggtgccacctgtggtccacctgaccctccgccaggccggcgacgacttctcccgccgctaccgccgcgacttcgccgagatgtccaggcagctgcacctgacgcccttcaccgcgcggggacgctttgccacggtggtggaggagctcttcagggacggggtgaactgggggaggattgtggccttctttgagttcggtggggtcatgtgtgtggagagcgtcaaccgggagatgtcgcccctggtggacaacatcgccctgtggatgactgagtacctgaaccggcacctgcacacctggatccaggataacggaggctgggatgcctttgtggaactgtacggccccagcatgcggcctctgtttgatttctcctggctgtctctgaagactctgctcagtttggccctggtgggagcttgcatcaccctgggtgcctatctgggccacaagtgaagtcaacatgcctgccccaaacaaatatgcaaaaggttcactaaagcagtagaaataatatgcattgtcagtgatgttccatgaaacaaagctgcaggctgtttaagaaaaaataacacacatataaacatcacacacacagacagacacacacacacacaacaattaacagtcttcaggcaaaacgtcgaatcagctatttactgccaaagggaaatatcatttattttttacattattaagaaaaaaagatttatttatttaagacagtcccatcaaaactcctgtctttggaaatccgaccactaattgccaagcaccgcttcgtgtggctccacctggatgttctgtgcctgtaaacatagattcgctttccatgttgttggccggatcaccatctgaagagcagacggatggaaaaaggacctgatcattggggaagctggctttctggctgctggaggctggggagaaggtgttcattcacttgcatttctttgccctgggggctgtgatattaacagagggagggttcctgtggggggaagtccatgcctccctggcctgaagaagagactctttgcatatgactcacatgatgcatacctggtgggaggaaaagagttgggaacttcagatggacctagtacccactgagatttccacgccgaaggacagcgatgggaaaaatgcccttaaatcataggaaagtatttttttaagctaccaattgtgccgagaaaagcattttagcaatttatacaatatcatccagtaccttaagccctgattgtgtatattcatatattttggatacgcaccccccaactcccaatactggctctgtctgagtaagaaacagaatcctctggaacttgaggaagtgaacatttcggtgacttccgcatcaggaaggctagagttacccagagcatcaggccgccacaagtgcctgcttttaggagaccgaagtccgcagaacctgcctgtgtcccagcttggaggcctggtcctggaactgagccggggccctcactggcctcctccagggatgatcaacagggcagtgtggtctccgaatgtctggaagctgatggagctcagaattccactgtcaagaaagagcagtagaggggtgtggctgggcctgtcaccctggggccctccaggtaggcccgttttcacgtggagcatgggagccacgacccttcttaagacatgtatcactgtagagggaaggaacagaggccctgggcccttcctatcagaaggacatggtgaaggctgggaacgtgaggagaggcaatggccacggcccattttggctgtagcacatggcacgttggctgtgtggccttggcccacctgtgagtttaaagcaaggctttaaatgactttggagagggtcacaaatcctaaaagaagcattgaagtgaggtgtcatggattaattgacccctgtctatggaattacatgtaaaacattatcttgtcactgtagtttggttttatttgaaaacctgacaaaaaaaaagttccaggtgtggaatatgggggttatctgtacatcctggggcattaaaaaaaaaatcaatggtggggaactataaagaagtaacaaaagaagtgacatcttcagcaaataaactaggaaatttttttttcttccagtttagaatcagccttgaaacattgatggaataactctgtggcattattgcattatataccatttatctgtattaactttggaatgtactctgttcaatgtttaatgctgtggttgatatttcgaaagctgctttaaaaaaatacatgcatctcagcgtttttttgtttttaattgtatttagttatggcctatacactatttgtgagcaaaggtgatcgttttctgtttgagatttttatctcttgattcttcaaaagcattctgagaaggtgagataagccctgagtctcagctacctaagaaaaacctggatgtcactggccactgaggagctttgtttcaaccaagtcatgtgcatttccacgtcaacagaattgtttattgtgacagttatatctgttgtccctttgaccttgtttcttgaaggtttcctcgtccctgggcaattccgcatttaattcatggtattcaggattacatgcatgtttggttaaacccatgagattcattcagttaaaaatccagatggcaaatgaccagcagattcaaatctatggtggtttgacctttagagagttgctttacgtggcctgtttcaacacagacccacccagagccctcctgccctccttccgcgggggctttctcatggctgtccttcagggtcttcctgaaatgcagtggtgcttacgctccaccaagaaagcaggaaacctgtggtatgaagccagacctccccggcgggcctcagggaacagaatgatcagacctttgaatgattctaatttttaagcaaaatattattttatgaaaggtttacattgtcaaagtgatgaatatggaatatccaatcctgtgctgctatcctgccaaaatcattttaatggagtcagtttgcagtatgctccacgtggtaagatcctccaagctgctttagaagtaacaatgaagaacgtggacgcttttaatataaagcctgttttgtcttctgttgttgttcaaacgggattcacagagtatttgaaaaatgtatatatattaagaggtcacgggggctaattgctggctggctgccttttgctgtggggttttgttacctggttttaataacagtaaatgtgcccagcctcttggccccagaactgtacagtattgtggctgcacttgctctaagagtagttgatgttgcattttccttattgttaaaaacatgttagaagcaatgaatgtatataaaagcctcaactagtcatttttttctcctcttcttttttttcattatatctaattattttgcagttgggcaacagagaaccatccctattttgtattgaagagggattcacatctgcatcttaactgctctttatgaatgaaaaaacagtcctctgtatgtactcctctttacactggccagggtcagagttaaatagagtatatgcactttccaaattggggacaagggctctaaaaaaagccccaaaaggagaagaacatctgagaacctcctcggccctcccagtccctcgctgcacaaatactccgcaagagaggccagaatgacagctgacagggtctatggccatcgggtcgtctccgaagatttggcaggggcagaaaactctggcaggcttaagatttggaataaagtcacagaatcaaggaagcacctcaatttagttcaaacaagacgccaacattctctccacagctcacttacctctctgtgttcagatgtggccttccatttatatgtgatctttgttttattagtaaatgcttatcatctaaagatgtagctctggcccagtgggaaaaattaggaagtgattataaatcgagaggagttataataatcaagattaaatgtaaataatcagggcaatcccaacacatgtctagctttcacctccaggatctattgagtgaacagaattgcaaatagtctctatttgtaattgaacttatcctaaaacaaatagtttataaatgtgaacttaaactctaattaattccaactgtacttttaaggcagtggctgtttttagactttcttatcacttatagttagtaatgtacacctactctatcagagaaaaacaggaaaggctcgaaatacaagccattctaaggaaattagggagtcagttgaaattctattctgatcttattctgtggtgtcttttgcagcccagacaaatgtggttacacactttttaagaaatacaattctacattgtcaagcttatgaaggttccaatcagatctttattgttattcaatttggatctttcagggattttttttttaaattattatgggacaaaggacatttgttggaggggtgggagggaggaacaatttttaaatataaaacattcccaagtttggatcagggagttggaagttttcagaataaccagaactaagggtatgaaggacctgtattggggtcgatgtgatgcctctgcgaagaaccttgtgtgacaaatgagaaacattttgaagtttgtggtacgacctttagattccagagacatcagcatggctcaaagtgcagctccgtttggcagtgcaatggtataaatttcaagctggatatgtctaatgggtatttaaacaataaatgtgcagttttaactaacaggatatttaatgacaaccttctggttggtagggacatctgtttctaaatgtttattatgtacaatacagaaaaaaattttataaaattaagcaatgtgaaactgaattggagagtgataatacaagtcctttagtcttacccagtgaatcattctgttccatgtctttggacaaccatgaccttggacaatcatgaaatatgcatctcactggatgcaaagaaaatcagatggagcatgaatggtactgtaccggttcatctggactgccccagaaaaataacttcaagcaaacatcctatcaacaacaaggttgttctgcataccaagctgagcacagaagatgggaacactggtggaggatggaaaggctcgctcaatcaagaaaattctgagactattaataaataagactgtagtgtagatactgagtaaatccatgcacctaaaccttttggaaaatctgccgtgggccctccagatagctcatttcattaagtttttccctccaaggtagaatttgcaagagtgacagtggattgcatttcttttggggaagctttcttttggtggttttgtttattataccttcttaagttttcaaccaaggtttgcttttgttttgagttactggggttatttttgttttaaataaaaataagtgtacaataagtgtttttgtattgaaagcttttgttatcaagattttcatacttttaccttccatggctctttttaagattgatacttttaagaggtggctgatattctgcaacactgtacacataaaaaatacggtaaggatactttacatggttaaggtaaagtaagtctccagttggccaccattagctataatggcactttgtttgtgttgttggaaaaagtcacattgccattaaactttccttgtctgtctagttaatattgtgaagaaaaataaagtacagtgtgagatactg

SEQ ID NO: 333 - protein, 205 aa, Homo sapien
MAHAGRTGYDNREIVMKYIHYKLSQRGYEWDAGDVGAAPPGAAPAPGIFSSQPGHTPHPAASRDPVARTSPLQTPAAPGAAAGPALSPVPPVVHLALRQAGDDFSRRYRGDFAEMSSQLHLTPFTARGRFATVVEELFRDGVNWGRIVAFFEFGGVMCVESVNREMSPLVDNIALWMTEYLNRHLHTWIQDNGGWVGASGDVSLG

SEQ ID NO: 334 - DNA, 3445 bp, Homo sapien
gagtgactccaccgcccggagcagcggtgcaggacgcgcgtctccgccgcccgcggtgacttctgcctgcgctccttctctgaacgctcacttccgaggagacgccgacgatgaagacaccgtggaaggttcttctgggactgctgggtgctgctgcgcttgtcaccatcatcaccgtgcccgtggttctgctgaacaaaggcacagatgatgctacagctgacagtcgcaaaacttacactctaactgattacttaaaaaatacttatagactgaagttatactccttaagatggatttcagatcatgaatatctctacaaacaagaaaataatatcttggtattcaatgctgaatatggaaacagctcagttttcttggagaacagtacatttgatgagtttggacattctatcaatgattattcaatatctcctgatgggcagtttattctcttagaatacaactacgtgaagcaatggaggcattcctacacagcttcatatgacatttatgatttaaataaaaggcagctgattacagaagagaggattccaaacaacacacagtgggtcacatggtcaccagtgggtcataaattggcatatgtttggaacaatgacatttatgttaaaattgaaccaaatttaccaagttacagaatcacatggacggggaaagaagatataatatataatggaataactgactgggtttatgaagaggaagtcttcagtgcctactctgctctgtggtggtctccaaacggcacttttttagcatatgcccaatttaacgacacagaagtcccacttattgaatactccttctactctgatgagtcactgcagtacccaaagactgtacgggttccatatccaaaggcaggagctgtgaatccaactgtaaagttctttgttgtaaatacagactctctcagctcagtcaccaatgcaacttccatacaaatcactgctcctgcttctatgttgataggggatcactacttgtgtgatgtgacatgggcaacacaagaaagaatttctttgcagtggctcaggaggattcagaactattcggtcatggatatttgtgactatgatgaatccagtggaagatggaactgcttagtggcacggcaacacattgaaatgagtactactggctgggttggaagatttaggccttcagaacctcattttacccttgatggtaatagcttctacaagatcatcagcaatgaagaaggttacagacacatttgctatttccaaatagataaaaaagactgcacatttattacaaaaggcacctgggaagtcatcgggatagaagctctaaccagtgattatctatactacattagtaatgaatataaaggaatgccaggaggaaggaatctttataaaatccaacttagtgactatacaaaagtgacatgcctcagttgtgagctgaatccggaaaggtgtcagtactattctgtgtcattcagtaaagaggcgaagtattatcagctgagatgttccggtcctggtctgcccctctatactctacacagcagcgtgaatgataaagggctgagagtcctggaagacaattcagctttggataaaatgctgcagaatgtccagatgccctccaaaaaactggacttcattattttgaatgaaacaaaattttggtatcagatgatcttgcctcctcattttgataaatccaagaaatatcctctactattagatgtgtatgcaggcccatgtagtcaaaaagcagacactgtcttcagactgaactgggccacttaccttgcaagcacagaaaacattatagtagctagctttgatggcagaggaagtggttaccaaggagataagatcatgcatgcaatcaacagaagactgggaacatttgaagttgaagatcaaattgaagcagccagacaattttcaaaaatgggatttgtggacaacaaacgaattgcaatttggggctggtcatatggagggtacgtaacctcaatggtcctgggatcgggaagtggcgtgttcaagtgtggaatagccgtggcgcctgtatcccggtgggagtactatgactcagtgtacacagaacgttacatgggtctcccaactccagaagacaaccttgaccattacagaaattcaacagtcatgagcagagctgaaaattttaaacaagttgagtacctccttattcatggaacagcagatgataacgttcactttcagcagtcagctcagatctccaaagccctggtcgatgttggagtggatttccaggcaatgtggtatactgatgaagaccatggaatagctagcagcacagcacaccaacatatatatacccacatgagccacttcataaaacaatgtttctctttaccttagcacctcaaaataccatgccatttaaagcttattaaaactcatttttgttttcattatctcaaaactgcactgtcaagatgatgatgatctttaaaatacacactcaaatcaagaaacttaaggttacctttgttcccaaatttcatacctatcatcttaagtagggacttctgtcttcacaacagattattaccttacagaagtttgaattatccggtcgggttttattgtttaaaatcatttctgcatcagctgctgaaacaacaaataggaattgtttttatggaggctttgcatagattccctgagcaggattttaatctttttctaactggactggttcaaatgttgttctcttctttaaagggatggcaagatgtgggcagtgatgtcactagggcagggacaggataagagggattagggagagaagatagcagggcatggctgggaacccaagtccaagcataccaacacgagcaggctactgtcagctcccctcggagaagagctgttcacagccagactggcacagttttctgagaaagactattcaaacagtctcaggaaatcaaatatgcaaagcactgacttctaagtaaaaccacagcagttgaaaagactccaaagaaatgtaagggaaactgccagcaacgcaggcccccaggtgccagttatggctataggtgctacaaaaacacagcaagggtgatgggaaagcattgtaaatgtgcttttaaaaaaaaatactgatgttcctagtgaaagaggcagcttgaaactgagatgtgaacacatcagcttgccctgttaaaagatgaaaatatttgtatcacaaatcttaacttgaaggagtccttgcatcaatttttcttatttcatttctttgagtgtcttaattaaaagaatattttaacttccttggactcattttaaaaaatggaacataaaatacaatgttatgtattattattcccattctacatactatggaatttctcccagtcatttaataaatgtgccttcattttttc

SEQ ID NO: 335 - protein, 766 aa, Homo sapien
MKTPWKVLLGLLGAAALVTIITVPVVLLNKGTDDATADSRKTYTLTDYLKNTYRLKLYSLRWISDHEYLYKQENNILVFNAEYGNSSVFLENSTFDEFGHSINDYSISPDGQFILLEYNYVKQWRHSYTASYDIYDLNKRQLITEERIPNNTQWVTWSPVGHKLAYVWNNDIYVKIEPNLPSYRITWTGKEDIIYNGITDWVYEEEVFSAYSALWWSPNGTFLAYAQFNDTEVPLIEYSFYSDESLQYPKTVRVPYPKAGAVNPTVKFFVVNTDSLSSVTNATSIQITAPASMLIGDHYLCDVTWATQERISLQWLRRIQNYSVMDICDYDESSGRWNCLVARQHIEMSTTGWVGRFRPSEPHFTLDGNSFYKIISNEEGYRHICYFQIDKKDCTFITKGTWEVIGIEALTSDYLYYISNEYKGMPGGRNLYKIQLSDYTKVTCLSCELNPERCQYYSVSFSKEAKYYQLRCSGPGLPLYTLHSSVNDKGLRVLEDNSALDKMLQNVQMPSKKLDFIILNETKFWYQMILPPHFDKSKKYPLLLDVYAGPCSQKADTVFRLNWATYLASTENIIVASFDGRGSGYQGDKIMHAINRRLGTFEVEDQIEAARQFSKMGFVDNKRIAIWGWSYGGYVTSMVLGSGSGVFKCGIAVAPVSRWEYYDSVYTERYMGLPTPEDNLDHYRNSTVMSRAENFKQVEYLLIHGTADDNVHFQQSAQISKALVDVGVDFQAMWYTDEDHGIASSTAHQHIYTHMSHFIKQCFSLP

SEQ ID NO: 336 - DNA, 3407 bp, Homo sapien
cgcgcgtctccgccgcccgcgtgacttctgcctgcgctccttctctgaacgctcacttccgaggagacgccgacgatgaagacaccgtggaagattcttctgggactgctgggtgctgctgcgcttgtcaccatcatcaccgtgcccgtggttctgctgaacaaaggcacagatgatgctacagctgacagtcgcaaaacttacactctaactgattacttaaaaaatacttatagactgaagttatactccttaagatggatttcagatcatgaatatctctacaaacaagaaaataatatcttggtattcaatgctgaatatggaaacagctcagttttcttggagaacagtacatttgatgagtttggacattctatcaatgattattcaatatctcctgatgggcagtttattctcttagaatacaactacgtgaagcaatggaggcattcctacacagcttcatatgacatttatgatttaaataaaaggcagctgattacagaagagaggattccaaacaacacacagtgggtcacatggtcaccagtgggtcataaattggcatatgtttggaacaatgacatttatgttaaaattgaaccaaatttaccaagttacagaatcacatggacggggaaagaagatataatatataatggaataactgactgggtttatgaagaggaagtcttcagtgcctactctgctctgtggtggtctccaaacggcacttttttagcatatgcccaatttaacgacacagaagtcccacttattgaatactccttctactctgatgagtcactgcagtacccaaagactgtacgggttccatatccaaaggcaggagctgtgaatccaactgtaaagttctttgttgtaaatacagactctctcagctcagtcaccaatgcaacttccatacaaatcactgctcctgcttctatgttgataggggatcactacttgtgtgatgtgacatgggcaacacaagaaagaatttctttgcagtggctcaggaggattcagaactattcggtcatggatatttgtgactatgatgaatccagtggaagatggaactgcttagtggcacggcaacacattgaaatgagtactactggctgggttggaagatttaggccttcagaacctcattttacccttgatggtaatagcttctacaagatcatcagcaatgaagaaggttacagacacatttgctatttccaaatagataaaaaagactgcacatttattacaaaaggcacctgggaagtcatcgggatagaagctctaaccagtgattatctatactacattagtaatgaatataaaggaatgccaggaggaaggaatctttataaaatccaacttattgactatacaaaagtgacatgcctcagttgtgagctgaatccggaaaggtgtcagtactattctgtgtcattcagtaaagaggcgaagtattatcagctgagatgttccggtcctggtctgcccctctatactctacacagcagcgtgaatgataaagggctgagagtcctggaagacaattcagctttggataaaatgctgcagaatgtccagatgccctccaaaaaactggacttcattattttgaatgaaacaaaattttggtatcagatgatcttgcctcctcattttgataaatccaagaaatatcctctactattagatgtgtatgcaggcccatgtagtcaaaaagcagacactgtcttcagactgaactgggccacttaccttgcaagcacagaaaacattatagtagctagctttgatggcagaggaagtggttaccaaggagataagatcatgcatgcaatcaacagaagactgggaacatttgaagttgaagatcaaattgaagcagccagacaattttcaaaaatgggatttgtggacaacaaacgaattgcaatttggggctggtcatatggagggtacgtaacctcaatggtcctgggatcgggaagtggcgtgttcaagtgtggaatagccgtggcgcctgtatcccggtgggagtactatgactcagtgtacacagaacgttacatgggtctcccaactccagaagacaaccttgaccattacagaaattcaacagtcatgagcagagctgaaaattttaaacaagttgagtacctccttattcatggaacagcagatgataacgttcactttcagcagtcagctcagatctccaaagccctggtcgatgttggagtggatttccaggcaatgtggtatactgatgaagaccatggaatagctagcagcacagcacaccaacatatatatacccacatgagccacttcataaaacaatgtttctctttaccttagcacctcaaaataccatgccatttaaagcttattaaaactcatttttgttttcattatctcaaaactgcactgtcaagatgatgatgatctttaaaatacacactcaaatcaagaaacttaaggttacctttgttcccaaatttcatacctatcatcttaagtagggacttctgtcttcacaacagattattaccttacagaagtttgaattatccggtcgggttttattgtttaaaatcatttctgcatcagctgctgaaacaacaaataggaattgtttttatggaggctttgcatagattccctgagcaggattttaatctttttctaactggactggttcaaatgttgttctcttctttaaagggatggcaagatgtgggcagtgatgtcactagggcagggacaggataagagggattagggagagaagatagcagggcatggctgggaacccaagtccaagcataccaacacgagcaggctactgtcagctcccctcggagaagagctgttcaccacgagactggcacagttttctgagaaagactattcaaacagtctcaggaaatcaaatatcgaaagcactgacttctaagtaaaccacagcagttgaaagactccaaagaaatgtaagggaaactgccagcaacgcagcccccaggtgccagttatggctataggtgctacaaaaacacagcaagggtgatgggaaagcattgtaaatgtgcttttaaaaaaaaatactgatgttcctagtgaaagaggcagcttgaaactgagatgtgaacacatcagcttgccctgttaaaagatgaaaatatttgtatcacaaatcttaacttgaaggagtccttgcatcaatttttcttatttcatttctttgagtgtcttaattaaaagaatattttaacttccttggactcattttaaaaaatggaacataaaatacaatgttatgtattattattcccattctacatactatggaatttctcccagtcatttaataaatgtgccttcattttttc

SEQ ID NO: 337 - protein, 766 aa, Homo sapien [sequence omitted]

SEQ ID NO: 338 - DNA, 1097 bp, Homo sapien
aagtgctgcgagccctgggccacgctggccgtgctggcagtgggccgcctcgatccctctgcagtctttcccttgaggctccaagaccagcaggtgaggcctcgcggcgctgaaaccgtgaggcccggaccacaggctccagatggaccctgggaaggacaaagagggggtgccccagccctcagggccgccagcaaggaagaaatttgtgatacccctcgacgaggatgaggtccctcctggagtggccaagcccttattccgatctacacagagccttcccactgtggacacctcggcccaggcggcccctcagacctacgccgaatatgccatctcacagcctctggaaggggctggggccacgtgccccacagggtcagagcccctggcaggagagacgcccaaccaggccctgaaacccggggcaaaatccaacagcatcattgtgagccctcggcagaggggcaatcccgtactgaagttcgtgcgcaacgtgccctgggaatttggcgacgtaattcccgactatgtgctgggccagagcacctgtgccctgttcctcagcctccgctaccacaacctgcacccagactacatccatgggcggctgcagagcctggggaagaacttcgccttgcgggtcctgcttgtccaggtggatgtgaaagatccccagcaggccctcaaggagctggctaagatgtgtatcctggccgactgcacattgatcctcgcctggagccccgaggaagctgggcggtacctggagacctacaaggcctatgagcagaaaccagcggacctcctgatggagaagctagagcaggacttcgtctcccgggtgactgaatgtctgaccaccgtgaagtcagtcaacaaaacggacagtcagaccctcctgaccacatttggatctctggaacagctcatcgccgcatcaagagaagatctggccttatgcccaggcctgggccctcagaaagcccggaggctgtttgatgtcctgcacgagcccttcttgaaagtaccctgatgaccccagctgccaaggaaacccccagtgtaataataaatcgtcctcccaggccaggctc

SEQ ID NO: 339 - protein, 297 aa, Homo sapien
MDPGKDKEGVPQPSGPPARKKFVIPLDEDEVPPGVAKPLFRSTQSLPTVDTSAQAAPQTYAEYAISQPLEGAGATCPTGSEPLAGETPNQALKPGAKSNSIIVSPRQRGNPVLKFVRNVPWEFGDVIPDYVLGQSTCALFLSLRYHNLHPDYIHGRLQSLGKNFALRVLLVQVDVKDPQQALKELAKMCILADCTLILAWSPEEAGRYLETYKAYEQKPADLLMEKLEQDFVSRVTECLTTVKSVNKTDSQTLLTTFGSLEQLIAASREDLALCPGLGPQKARRLFDVLHEPFLKVP

SEQ ID NO: 340 - DNA, 5361 bp, Homo sapien
gccagcgatcagagcagcgctgggtgttcaggggccaagatggcggcgcgccggggacggagagacggagtcgcgccgcccccgagtgggggccccggtccggaccctggcgggggagcccgcggcagtggttggcgaagtcgaagccaagcgccgtatgggactttgggcgctgtgagcggcggcgagcaggtgctgctgcatgaggaggcgggtgattctggctttgtcagtctctctcggcagggcccatctctgagggacaaggacctggaaatggaggagctaatgctgcaggatgagacactgctggggaccatgcagagctacatggatgcctcccttatctccctcattgaggattttgggagccttggagagagcaggttatctctggaggaccacaatgaagtgtcgctgctcacggctctgacggagatcttggacaatgcagattctgagaacctttctccatttgacagcattcctgattcggagctgcttgtgtcaccccgggagggctcctctctgcacaagctgcttactctctctcggacacccccagaacgtgacctcatcaccccagttgacccactggggcccagtacgggcagcagtagagggagtggggttgaaatgtctcttccagatccctcttgggacttctccccaccctctttcttagagacctcttcccccaagcttcctagctggagacccccaagatcaagaccacgctggggccaatccccacctccccagcagcgcagtgatggagaagaagaggaggaggtggccagcttcagtggccagattcttgccggggagcttgacaactgtgtgagcagtatcccggacttccccatgcatttggcctgccctgaggaggaagataaagcaacagcagcagagatggcagtgccagcagctggtgatgagagcatctcctccctgagtgagctggtgcgggccatgcacccatactgcctgcccaacctcacccacctggcatcacttgaggatgagcttcaggagcagccagatgatttgacactgcctgagggctgcgtagtgctggagattgtggggcaggcagccacagctggcgatgacctggagatcccagttgtggtgcgacaggtctctcctggaccccggcctgtgctcctggatgactcgctagagactagttctgccttgcagctgcttatgcctacactggagtcagagacagaggctgctgtgcccaaggtaaccctctgctctgagaaagaggggttgtcattgaactcagaggagaagctggactcagcctgcttattgaagcccagggaggtcgtggagccggtggtgcccaaggagcctcagaacccacctgccaatgcagcaccaggttcccagagagctcgaaagggcaggaagaagaagagcaaggagcagccagcagcctgtgtggaaggctatgccaggaggctgaggtcatcttctcgcgggcagtctactgtaggtacagaagtgacctctcaggtagacaacttgcagaaacagcctcaggaagaacttcaaaaagagtctgggcctctccagggtaaggggaagccccgggcttgggctcgggcctgggcagctgccttggagaattctagccctaagaacttggagagaagtgctggacaaagtagtcctgctaaagaaggccctctagacctctacccaaagctggctgacactatccaaaccaatcctataccaacccatctctcattggtcgactctgcccaagccagccccatgccagttgactctgttgaagctgatcccactgcagttggccctgttctagctggccctgtacctgttgaccctgggttggttgaccttgcttcaaccagctcagaactggttgagcctctcccggctgagccagtgctgatcaacccagtcctggctgactcagcagcagttgaccctgcagtggttcccatctcagataacttgccaccagttgatgctgtcccgtctggcccagcaccagttgatctagcactggttgaccctgttcctaatgacctgactccagttgacccagtgctagttaagtccagaccaactgatcccagacgtggtgcagtgtcatcagccctggggggttcagcaccccagctcctcgtggagtcagagtccttggacccaccaaagaccatcatccctgaagtcaaagaggttgtggattctctgaaaattgaaagtggtaccagtgctacaacccatgaagccagacctcggcctctcagcttatctgagtaccggcgacgaaggcagcaacgccaagcagaaacagaagagagaagtccacagcccccaactgggaagtggcctagccttccagagactcccacagggctggcagacatcccttgtcttgtcatcccaccagccccagccaagaagacagctctgcagagaagccctgaaacaccccttgagatttgccttgtgcctgtaggtcccagccctgcttctcctagtcctgagccacctgtaagcaaacctgtggcctcatctcccactgagcaggtgccatcccaggagatgccactgttggcgagaccttcccctcctgtgcagtctgtgtcccctgctgtgcccacacctccctcgatgtctgctgccctgcctttccctgcaggtgggcttggcatgccccccagtctgcccccacctcccttgcagcctcctagtcttccattgtctatggggccagtactacctgatccgtttactcactatgcccccttgccatcctggccttgttatcctcatgtgtccccttctggctatccttgcctgccccccccaccaacggtgcccctagtgtctggtactcctggtgcctatgccgtgcctcccacttgcagtgtgccttgggcaccccctcctgccccagtctcaccttacagttccacatgtacctatgggcccttgggatggggcccagggcctcaacatgctccattctggtctactgttcccccacctcctttgcctccagcctccattgggagagctgttccccaacctaaaatggagtctaggggcactccagctggccctcctgaaaatgtacttcccttgtcgatggctcctcccctcagtcttgggctacctggccatggagctcctcagacagagcctaccaaggtggaggtcaagccagtgcctgcatctccccatccgaaacacaaggtgtctgccctggtgcaaagtccccagatgaaggctctagcatgtgtgtctgctgaaggtgtgactgttgaggagcctgcatcagagaggctaaagcctgagacccaagagaccaggcccagggagaagccccccttgcctgctaccaaggctgttcccacaccaaggcagagcactgtccccaagctgcctgctgtccacccagcccgtctaaggaagctgtccttcctgcctaccccacgtactcagggttctgaagatgtggtacaggctttcatcagtgagattggaattgaggcatcggacctgtccagtctgctggagcagtttgagaaatcagaagccaaaaaggagtgtcctcctccggctcctgctgacagcttggctgtaggaaactcaggcggcgttgacattccccaggagaagaggcccctagaccggttacaagccccagaactggccaacgtggcagggctcacccctccagctacccctccccaccagttatggaagcccctggctgctgtctcactgctggccaaagccaaatctcctaagtccaccgcccaggagggaaccctgaagcctgaaggagttacggaggccaaacatccagctgcagttcgcctccaagaaggggtccatggccctagtcgagtccatgtgggctctggggaccatgactattgtgtccggagcaggacccccccaaaaaagatgcctgccctagtcattccagaggtgggctcccgatggaatgtcaagcgccatcaggacatcaccatcaaacctgtcttgtccttgggcccagctgcccctccgcccccatgcatagctgcctcccgggagccgcttgatcacaggactagcagtgagcaggcagatccctcagcaccctgccttgccccatccagcttgctgtcccctgaggcctcaccctgccggaatgacatgaacactaggactccccctgaaccctcagccaagcagcggtcaatgcgctgttaccgaaaagcctgcaggtcagccagcccctcaagccagggctggcagggccgccgaggccgcaacagccgttctgtcagctctgggtccaaccggactagcgaagcatcttcctcatcctcatcatcgtcttcctcatcccgatctcggtccaggtccctctcccccccacacaagaggtggcgaaggtccagctgtagttcctctggacgttctcgaagatgctcttcctcttcttcgtcatcatcttcctcttcgtcttcctcatcctcatcatccagttctcgaagccgctcacgatccccatccccccgccggagaagtgacaggaggcggcggtacagctcttatcgttcacatgaccattaccaaaggcaaagagtgctacaaaaggagcgtgcaatagaagaaagaagggtggtcttcattggaaagatacctggccgcatgactcgatcagagctgaaacagaggttctccgtttttggagagattgaggagtgcaccatccacttccgtgtccaaggggacaactacggcttcgtcacttatcgctatgctgaggaggcatttgcagccattgagagtggccacaagctgcggcaggcagatgagcagccctttgatctctgctttgggggccgaaggcagttctgcaagaggagctattctgatcttgactccaaccgggaagactttgacccagcacctgtaaagagcaaatttgattctcttgactttgacacattgttgaaacaggcccagaagaacctcaggaggtaaccttgggcccttccctgctatcctttttctcctttggaggtgcccaacctcctccacccccttcccctactctaggggagagagctgctagtgagatgactgttttataaagaaatggaaaaaagtgaaataaaaaatatgttgaatcagattttttaaaaggggtatttgtttttttataacaggtattgaaacaagttaacttgcattcctatgtaagataggaggggctgaggggatccccagtgtttggaacataagtcactatgcagactaataaacatcaactagagagagaaaaaaaaaaaaaaaaaaaaaaaaaaaaaa

SEQ ID NO: 341 - protein, 1664 aa, Homo sapien
MAARRGRRDGVAPPPSGGPGPDPGGGARGSGWRSRSQAPYGTLGAVSGGEQVLLHEEAGDSGFVSLSRQGPSLRDKDLEMEELMLQDETLLGTMQSYMDASLISLIEDFGSLGESRLSLEDHNEVSLLTALTEILDNADSENLSPFDSIPDSELLVSPREGSSLHKLLTLSRTPPERDLITPVDPLGPSTGSSRGSGVEMSLPDPSWDFSPPSFLETSSPKLPSWRPPRSRPRWGQSPPPQQRSDGEEEEEVASFSGQILAGELDNCVSSIPDFPMHLACPEEEDKATAAEMAVPAAGDESISSLSELVRAMHPYCLPNLTHLASLEDELQEQPDDLTLPEGCVVLEIVGQAATAGDDLEIPVVVRQVSPGPRPVLLDDSLETSSALQLLMPTLESETEAAVPKVTLCSEKEGLSLNSEEKLDSACLLKPREVVEPVVPKEPQNPPANAAPGSQRARKGRKKKSKEQPAACVEGYARRLRSSSRGQSTVGTEVTSQVDNLQKQPQEELQKESGPLQGKGKPRAWARAWAAALENSSPKNLERSAGQSSPAKEGPLDLYPKLADTIQTNPIPTHLSLVDSAQASPMPVDSVEADPTAVGPVLAGPVPVDPGLVDLASTSSELVEPLPAEPVLINPVLADSAAVDPAVVPISDNLPPVDAVPSGPAPVDLALVDPVPNDLTPVDPVLVKSRPTDPRRGAVSSALGGSAPQLLVESESLDPPKTIIPEVKEVVDSLKIESGTSATTHEARPRPLSLSEYRRRRQQRQAETEERSPQPPTGKWPSLPETPTGLADIPCLVIPPAPAKKTALQRSPETPLEICLVPVGPSPASPSPEPPVSKPVASSPTEQVPSQEMPLLARPSPPVQSVSPAVPTPPSMSAALPFPAGGLGMPPSLPPPPLQPPSLPLSMGPVLPDPFTHYAPLPSWPCYPHVSPSGYPCLPPPPTVPLVSGTPGAYAVPPTCSVPWAPPPAPVSPYSSTCTYGPLGWGPGPQHAPFWSTVPPPPLPPASIGRAVPQPKMESRGTPAGPPENVLPLSMAPPLSLGLPGHGAPQTEPTKVEVKPVPASPHPKHKVSALVQSPQMKALACVSAEGVTVEEPASERLKPETQETRPREKPPLPATKAVPTPRQSTVPKLPAVHPARLRKLSFLPTPRTQGSEDVVQAFISEIGIEASDLSSLLEQFEKSEAKKECPPPAPADSLAVGNSGGVDIPQEKRPLDRLQAPELANVAGLTPPATPPHQLWKPLAAVSLLAKAKSPKSTAQEGTLKPEGVTEAKHPAAVRLQEGVHGPSRVHVGSGDHDYCVRSRTPPKKMPALVIPEVGSRWNVKRHQDITIKPVLSLGPAAPPPPCIAASREPLDHRTSSEQADPSAPCLAPSSLLSPEASPCRNDMNTRTPPEPSAKQRSMRCYRKACRSASPSSQGWQGRRGRNSRSVSSGSNRTSEASSSSSSSSSSSRSRSRSLSPPHKRWRRSSCSSSGRSRRCSSSSSSSSSSSSSSSSSSSSRSRSRSPSPRRRSDRRRRYSSYRSHDHYQRQRVLQKERAIEERRVVFIGKIPGRMTRSELKQRFSVFGEIEECTIHFRVQGDNYGFVTYRYAEEAFAAIESGHKLRQADEQPFDLCFGGRRQFCKRSYSDLDSNREDFDPAPVKSKFDSLDFDTLLKQAQKNLRR

SEQ ID NO: 342 - DNA, 423 bp, Homo sapien
ccggaagtgactgcggacgaatcggcgtttgccgaggctggcatagatttggctgtctccgctcatagctgcttttggcgcgaaagatgccgggtctggttgactcaaaccctgccccgcctgagtctcaggagaagaagccgctgaagccctgctgcgcttgcccggagaccaagaaggcgcgcgatgcgtgtatcatcgagaaaggagaagaacactgtggacatctaattgaggcccacaaggaatgcatgagagccctaggatttaaaatatgaaatggtggtctgctgtgtgaataaataattcctgaagaatgaagaagattaattttgggagttctttgacgaactttgatatgtggaaaaagtatttataatttattgtaagaagaaagtaaaatattactagtggaagatcttc

SEQ ID NO: 343 - protein, 63 aa, Homo sapien
MPGLVDSNPAPPESQEKKPLKPCCACPETKKARDACIIEKGEEHCGHLIEAHKECMRALGFKI

SEQ ID NO: 344 - DNA, 2545 bp, Homo sapien
atccaatacaggagtgacttggaactccattctatcactatgaagaaaagtggtgttcttttcctcttgggcatcatcttgctggttctgattggagtgcaaggaaccccagtagtgagaaagggtcgctgttcctgcatcagcaccaaccaagggactatccacctacaatccttgaaagaccttaaacaatttgccccaagcccttcctgcgagaaaattgaaatcattgctacactgaagaatggagttcaaacatgtctaaacccagattcagcagatgtgaaggaactgattaaaaagtgggagaaacaggtcagccaaaagaaaaagcaaaagaatgggaaaaaacatcaaaaaaagaaagttctgaaagttcgaaaatctcaacgttctcgtcaaaagaagactacataagagaccacttcaccaataagtattctgtgttaaaaatgttctattttaattataccgctatcattccaaaggaggatggcatataatacaaaggcttattaatttgactagaaaatttaaaacattactctgaaattgtaactaaagttagaaagttgattttaagaatccaaacgttaagaattgttaaaggctatgattgtctttgttcttctaccacccaccagttgaatttcatcatgcttaaggccatgattttagcaatacccatgtctacacagatgttcacccaaccacatcccactcacaacagctgcctggaagagcagccctaggcttccacgtactgcagcctccagagagtatctgaggcacatgtcagcaagtcctaagcctgttagcatgctggtgagccaagcagtttgaaattgagctggacctcaccaagctgctgtggccatcaacctctgtatttgaatcagcctacaggcctcacacacaatgtgtctgagagattcatgctgattgttattgggtatcaccactggagatcaccagtgtgtggctttcagagcctcctttctggctttggaagccatgtgattccatcttgcccgctcaggctgaccactttatttctttttgttcccctttgcttcattcaagtcagctcttctccatcctaccacaatgcagtgcctttcttctctccagtgcacctgtcatatgctctgatttatctgagtcaactcctttctcatcttgtccccaacaccccacagaagtgctttcttctcccaattcatcctcactcagtccagcttagttcaagtcctgcctcttaaataaacctttttggacacacaaattatcttaaaactcctgtttcacttggttcagtaccacatgggtgaacactcaatggttaactaattcttgggtgtttatcctatctctccaaccagattgtcagctccttgagggcaagagccacagtatatttccctgtttcttccacagtgcctaataatactgtggaactaggttttaataattttttaattgatgttgttatgggcaggatggcaaccagaccattgtctcagagcaggtgctggctctttcctggctactccatgttggctagcctctggtaacctcttacttattatcttcaggacactcactacagggaccagggatgatgcaacatccttgtctttttatgacaggatgtttgctcagcttctccaacaataagaagcacgtggtaaaacacttgcggatattctggactgtttttaaaaaatatacagtttaccgaaaatcatataatcttacaatgaaaaggactttatagatcagccagtgaccaaccttttcccaaccatacaaaaattccttttcccgaaggaaaagggctttctcaataagcctcagctttctaagatctaacaagatagccaccgagatccttatcgaaactcattttaggcaaatatgagttttattgtccgtttacttgtttcagagtttgtattgtgattatcaattaccacaccatctcccatgaagaaagggaacggtgaagtactaagcgctagaggaagcagccaagtcggttagtggaagcatgattggtgcccagttagcctctgcaggatgtggaaacctccttccaggggaggttcagtgaattgtgtaggagaggttgtctgtggccagaatttaaacctatactcactttcccaaattgaatcactgctcacactgctgatgatttagagtgctgtccggtggagatcccacccgaacgtcttatctaatcatgaaactccctagttccttcatgtaacttccctgaaaaatctaagtgtttcataaatttgagagtctgtgacccacttaccttgcatctcacaggtagacagtatataactaacaaccaaagactacatattgtcactgacacacacgttataatcatttatcatatatatacatacatgcatacactctcaaagcaaataatttttcacttcaaaacagtattgacttgtataccttgtaatttgaaatattttctttgttaaaatagaatggtatcaataaatagaccattaatcag

SEQ ID NO: 345 - protein, 125 aa, Homo sapien
MKKSGVLFLLGIILLVLIGVQGTPVVRKGRCSCISTNQGTIHLQSLKDLKQFAPSPSCEKIEIIATLKNGVQTCLNPDSADVKELIKKWEKQVSQKKKQKNGKKHQKKKVLKVRKSQRSRQKKTT

SEQ ID NO: 346 - DNA, 2653 bp, Homo sapien
gagcgcggctggagtttgctgctgccgctgtgcagtttgttcaggggcttgtggtggtgagtccgagaggctgcgtgtgagagacgtgagaaggatcctgcactgaggaggtggaaagaagaggattgctcgaggaggcctggggtctgtgaggcagcggagctgggtgaaggctgcgggttccggcgaggcctgagctgtgctgtcgtcatgcctcaaacccgatcccaggcacaggctacaatcagttttccaaaaaggaagctgtctcgggcattgaacaaagctaaaaactccagtgatgccaaactagaaccaacaaatgtccaaaccgtaacctgttctcctcgtgtaaaagccctgcctctcagccccaggaaacgtctgggcgatgacaacctatgcaacactccccatttacctccttgttctccaccaaagcaaggcaagaaagagaatggtccccctcactcacatacacttaagggacgaagattggtatttgacaatcagctgacaattaagtctcctagcaaaagagaactagccaaagttcaccaaaacaaaatactttcttcagttagaaaaagtcaagagatcacaacaaattctgagcagagatgtccactgaagaaagaatctgcatgtgtgagactattcaagcaagaaggcacttgctaccagcaagcaaagctggtcctgaacacagctgtcccagatcggctgcctgccagggaaagggagatggatgtcatcaggaatttcttgagggaacacatctgtgggaaaaaagctggaagcctttacctttctggtgctcctggaactggaaaaactgcctgcttaagccggattctgcaagacctcaagaaggaactgaaaggctttaaaactatcatgctgaattgcatgtccttgaggactgcccaggctgtattcccagctattgctcaggagatttgtcaggaagaggtatccaggccagctgggaaggacatgatgaggaaattggaaaaacatatgactgcagagaagggccccatgattgtgttggtattggacgagatggatcaactggacagcaaaggccaggatgtattgtacacgctatttgaatggccatggctaagcaattctcacttggtgctgattggtattgctaataccctggatctcacagatagaattctacctaggcttcaagctagagaaaaatgtaagccacagctgttgaacttcccaccttataccagaaatcagatagtcactattttgcaagatcgacttaatcaggtatctagagatcaggttctggacaatgctgcagttcaattctgtgcccgcaaagtctctgctgtttcaggagatgttcgcaaagcactggatgtttgcaggagagctattgaaattgtagagtcagatgtcaaaagccagactattctcaaaccactgtctgaatgtaaatcaccttctgagcctctgattcccaagagggttggtcttattcacatatcccaagtcatctcagaagttgatggtaacaggatgaccttgagccaagaaggagcacaagattccttccctcttcagcagaagatcttggtttgctctttgatgctcttgatcaggcagttgaaaatcaaagaggtcactctggggaagttatatgaagcctacagtaaagtctgtcgcaaacagcaggtggcggctgtggaccagtcagagtgtttgtcactttcagggctcttggaagccaggggcattttaggattaaagagaaacaaggaaacccgtttgacaaaggtgtttttcaagattgaagagaaagaaatagaacatgctctgaaagataaagctttaattggaaatatcttagctactggattgccttaaattcttctcttacaccccacccgaaagtattcagctggcatttagagagctacagtcttcattttagtgctttacacattcgggcctgaaaacaaatatgaccttttttacttgaagccaatgaattttaatctatagattctttaatattagcacagaataatatctttgggtcttactatttttacccataaaagtgaccaggtagaccctttttaattacattcactacttctaccacttgtgtatctctagccaatgtgcttgcaagtgtacagatctgtgtagaggaatgtgtgtatatttacctcttcgtttgctcaaacatgagtgggtatttttttgtttgttttttttgttgttgttgtttttgaggcgcgtctcaccctgttgcccaggctggagtgcaatggcgcgttctctgctcactacagcacccgcttcccaggttgaagtgattctcttgcctcagcctcccgagtagctgggattacaggtgcccaccaccgcgcccagctaattttttaatttttagtagagacagggttttaccatgttggccaggctggtcttgaactcctgaccctcaagtgatctgcccaccttggcctccctaagtgctgggattataggcgtgagccaccatgctcagccattaaggtattttgttaagaactttaagtttagggtaagaagaatgaaaatgatccagaaaaatgcaagcaagtccacatggagatttggaggacactggttaaag

SEQ ID NO: 347 - protein, 560 aa, Homo sapien
MPQTRSQAQATISFPKRKLSRALNKAKNSSDAKLEPTNVQTVTCSPRVKALPLSPRKRLGDDNLCNTPHLPPCSPPKQGKKENGPPHSHTLKGRRLVFDNQLTIKSPSKRELAKVHQNKILSSVRKSQEITTNSEQRCPLKKESACVRLFKQEGTCYQQAKLVLNTAVPDRLPAREREMDVIRNFLREHICGKKAGSLYLSGAPGTGKTACLSRILQDLKKELKGFKTIMLNCMSLRTAQAVFPAIAQEICQEEVSRPAGKDMMRKLEKHMTAEKGPMIVLVLDEMDQLDSKGQDVLYTLFEWPWLSNSHLVLIGIANTLDLTDRILPRLQAREKCKPQLLNFPPYTRNQIVTILQDRLNQVSRDQVLDNAAVQFCARKVSAVSGDVRKALDVCRRAIEIVESDVKSQTILKPLSECKSPSEPLIPKRVGLIHISQVISEVDGNRMTLSQEGAQDSFPLQQKILVCSLMLLIRQLKIKEVTLGKLYEAYSKVCRKQQVAAVDQSECLSLSGLLEARGILGLKRNKETRLTKVFFKIEEKEIEHALKDKALIGNILATGLP

SEQ ID NO: 348 - DNA, 2653 bp, Homo sapien; identical to SEQ ID NO: 346

SEQ ID NO: 349 - protein, 560 aa, Homo sapien; identical to SEQ ID NO: 347

SEQ ID NO: 350 - DNA, 3111 bp, Homo sapien
ggagtgcggggcgcccggcgccaggggagccgccacagccatggattgcaaagatagaccagcttttccagttaagaagttaatacaagcccgtctgccgtttaagcgcctgaatcttgtcccaaaggggaaagccgatgacatgtcagacgatcagggtacttctgtgcaaagtaaaagccccgatttagaggcctctttggacaccttggaaaacaactgtcatgtgggttctgacatagactttagaccgaaacttgtcaacgggaagggtcccttagataactttttaagaaatagaatcgaaaccagtattggccagagcacagtcatcattgatttgacagaggactcgaatgagcagccagacagtcttgtggaccacaataaactaaattctgaagcctctccctccagggaggcaataaatggccagcgagaagacactggggatcagcaggggttgttgaaggccattcagaacgacaagttggcatttcctggagagaccctttcagacattccttgcaaaacagaggaggagggtgttggctgtggaggtgcagggaggagaggcgactcccaggaatgttcgccacggagctgcccggagctgacgagtggcccgagaatgtgccccagaaaggagcaggacagttggagtgaagctgggggcatcctgttcaaagggaaggtgcctatggtggtcttgcaggacatcttggctgtgagaccaccgcaaatcaagtcccttccagccacaccccaaggcaagaacatgacccctgagagtgaggtgctggaatctttccccgaagaagactctgtactcagccattcgtccctgagctctccctcttccaccagctcgcccgaggggccgcctgctcccccaaagcagcacagcagtaccagtcccttccccacctccacgcccctccgcagaataactaagaaattcgtcaaaggctctacagagaagaacaagctcagactgcaaagagatcaggagcgtctgggcaagcagctcaagttacgtgcagaaagggaagaaaaggagaagctgaaagaggaggccaagcgggccaaggaggaggccaagaagaagaaggaggaagagaaggagcttaaggaaaaggagaggcgggagaagcgggagaaggatgagaaggagaaggcggagaagcagcggctcaaggaggagcggcgcaaggagagacaggaagccctggaggctaaacttgaggaaaaaaggaaaaaggaagaagagaaacggttaagagaagaagagaagcgcattaaagcagagaaggccgaaatcacgaggttcttccagaaaccaaagactccacaggcccccaagaccctggccggctcctgtgggaagtttgccccctttgaaattaaagagcacatggtcctggcccctcggcgtcggaccgctttccatccagacctctgcagtcagctggaccagctcctccagcagcagagcggcgagttctccttcttgaaagacctcaaaggccggcagcccctgaggtccggacccacgcacgtttccacccggaatgcagatatttttaacagtgatgtcgtcatcgtggagcgtgggaagggcgacggtgttcccgagaggaggaagtttggcaggatgaagctcctgcagttctgtgagaaccaccggcctgcctactggggtacctggaataagaagacggcactcatccgcgcgcgagacccctgggcccaggacacgaagctcctggactatgaggtggacagtgatgaggagtgggaagaagaggagcctggggagtccctgtcccacagtgagggggatgatgatgacgacatgggagaggatgaagatgaggacgatggtttctttgtgccccatgggtacctgtctgaggacgaaggtgtgacagaggagtgtgccgaccctgagaaccataaggtccgccagaaactgaaggccaaggagtgggacgagttcctggctaaggggaagcgctttcgcgtcctgcaacctgtgaagatcggctgcgtgtgggcggctgacagagactgcgcaggcgatgacctgaaggtactgcagcagttcgcagcctgcttcctggagaccctgccggcccaggaggagcagacgcccaaggcctccaagcgggagaggagagacgagcagatcctggcccagctgctgccgctcctgcacggcaatgtgaacgggagcaaggtcatcatccgggagttccaggagcactgccgccggggactgctcagcaaccacaccggcagcccgcggacgccctccaccacctacctgcacacccccacccccagcgaggatgccgccatcccctctaagtcccggctcaagcggctcatttccgagaactcagtgtatgagaagcggcctgacttcaggatgtgctggtacgtgcacccgcaggtgctacagagcttccagcaggagcacctgcccgtgccgtgccagtggagctatgtgacatcggtgccctcggcccccaaagaggacagtggcagcgtcccctccacggggcccagccagggcactcccatctcgctgaagaggaagtcagcgggcagcatgtgcatcacccaattcatgaagaagcgcaggcacgacggccagattggtgctgaagacatggacggcttccaggcagacacggaggaggaggaagaggaggagggcgactgtatgatcgtggatgtcccggatgctgtggaggtccaagccccgtgtggagccgcttccggagctgggggtggtgtgggggtggacaccggcaaggccaccctgaccgcgagcccactgggtgcatcctgagagcaggggtgacgtatgtagaacgcttagggtgtcctccccacagagcagatacttgaaccgactcaattcctgtgtaaagagcactttgtcctgcttcacggacctccccaaagtgtgcagagttctatataggatgctggattagttcctttgatatttgtaaaaattcccccaagagccgcatatgaatctgccctttaataaagcattattgagattgctggcctattggggaagctgcgggcacagga

SEQ ID NO: 351 - protein, 938 aa, Homo sapien
MDCKDRPAFPVKKLIQARLPFKRLNLVPKGKADDMSDDQGTSVQSKSPDLEASLDTLENNCHVGSDIDFRPKLVNGKGPLDNFLRNRIETSIGQSTVIIDLTEDSNEQPDSLVDHNKLNSEASPSREAINGQREDTGDQQGLLKAIQNDKLAFPGETLSDIPCKTEEEGVGCGGAGRRGDSQECSPRSCPELTSGPRMCPRKEQDSWSEAGGILFKGKVPMVVLQDILAVRPPQIKSLPATPQGKNMTPESEVLESFPEEDSVLSHSSLSSPSSTSSPEGPPAPPKQHSSTSPFPTSTPLRRITKKFVKGSTEKNKLRLQRDQERLGKQLKLRAEREEKEKLKEEAKRAKEEAKKKKEEEKELKEKERREKREKDEKEKAEKQRLKEERRKERQEALEAKLEEKRKKEEEKRLREEEKRIKAEKAEITRFFQKPKTPQAPKTLAGSCGKFAPFEIKEHMVLAPRRRTAFHPDLCSQLDQLLQQQSGEFSFLKDLKGRQPLRSGPTHVSTRNADIFNSDVVIVERGKGDGVPERRKFGRMKLLQFCENHRPAYWGTWNKKTALIRARDPWAQDTKLLDYEVDSDEEWEEEEPGESLSHSEGDDDDDMGEDEDEDDGFFVPHGYLSEDEGVTEECADPENHKVRQKLKAKEWDEFLAKGKRFRVLQPVKIGCVWAADRDCAGDDLKVLQQFAACFLETLPAQEEQTPKASKRERRDEQILAQLLPLLHGNVNGSKVIIREFQEHCRRGLLSNHTGSPRTPSTTYLHTPTPSEDAAIPSKSRLKRLISENSVYEKRPDFRMCWYVHPQVLQSFQQEHLPVPCQWSYVTSVPSAPKEDSGSVPSTGPSQGTPISLKRKSAGSMCITQFMKKRRHDGQIGAEDMDGFQADTEEEEEEEGDCMIVDVPDAVEVQAPCGAASGAGGGVGVDTGKATLTASPLGAS

SEQ ID NO: 352 - DNA, 3404 bp, Homo sapien
gcagttcagacccccccacacccatcaaagagccgctcctcccccccgcaggcgccttcgccgcctccctcccttcctttcctttccgctcctcttccgacctgtccacccgggaggaagggagctggaaagggggcggaaacctctcccctccaaaaagcacaacaaaactgttcagtgcggaggagccgggttcgcccctgccggacagcggggggctttgttccccgcagttgtttcctgcccatttgacctgtcagctgctggggaaacgctgctgttgacctttggttgaactgctaaggcgattttgctgatttttctttctttttccgcgagggctgtcttttgctcctccaaatgagcccagtccccctcccttctccccaaagcgctccaagagaaagtgccaggaaggggcttgtcccggaaggcctggcggctgagcggggccaggtcctggttaggccaccagggtgggcgtccgcgccattgtttgagcttgtcggcgctggtgggagagatgagggcaattcctctgggacgcaagtcccctcgaatggccggggctggccgggatgttccccgcacggcgctgccctcgagtccccccgatggagagcgcgggcgcgccttccttcgctggcgtccaaacccgggaccagctagaacacagcagggctgggactgggttccagccccacgtggagtctggatttgttttgttgtgttttgctttccttcctggaagaaatcccgaggggaccgccctagagcggcagctccaggacctcggcccttgggcttccgggggtgcagccacttaggccccgctcccggggagagagggattattttttaagatttatccccagggcgcgcggcatttccctgtccctcgtgaatcccgttgagagtcctccctccccaacctcctccatttccccagccagaccgattcgagagccctggagattctgggcgaggctagtgactgggtagtacaggcctctagccccaccattgctctctctgtcttcagttccccaggagggcaatggcatcaaacagcacagctctgggggatgtcaatattgcataccttttctacctaaagggaaaatgactcgcttttctgcttgcaaatatggtagtttctgcttacaaatgtaatacaatgcccatgacagccaaggactggaagcataagttgctaggtcttacaggtgattttttacaatgaagcaaactcactatgttagacaccatttacattggatgtctccaactaacaaaagtaactaaagacagatgtaggtgtaaattgagagtgaaatttgaccctttagaccgtcacaacttccttgggcttatcctgggtgcttataggagaggtgggctccacccacaaaaatggactgctcagaaaaatgagggagagagaaagggtggccactttcccgagccaagaaattccttgaaaaaaaatcagaacatctgaaaccagagagccgatttccttaccgggaggcagttcctggctaacgaagaggaagcacgatgggaagaaaagttcactccaacggaagccagtttgctgaacatagcagatcgcccaggaggactgggagagactgcaaaccagttcgagcccccagcatggcgttaggtgtcagccagctggcaggaaggtccaggtgtctgtgttcagagtctcaaggcggctatgagaggttttcctccgagtacccagaattctgttctaaaaccaaggccctggcagccatcccacccccggttccccccagtgccacagagcccttggacctgggctgcagctcctgtgggaccccactacacgaccaggggggtcctgtggagatccttcccttcctctacctcggcagtgcctaccatgctgcccggagagacatgctggacgccctgggcatcacggctctgttgaatgtctcctcggactgcccaaaccactttgaaggacactatcagtacaagtgcatcccagtggaagataaccacaaggccgacatcagctcctggttcatggaagccatagagtacatcgatgccgtgaaggactgccgtgggcgcgtgctggtgcactgccaggcgggcatctcgcggtcggccaccatctgcctggcctacctgatgatgaagaaacgggtgaggctggaggaggccttcgagttcgttaagcagcgccgcagcatcatctcgcccaacttcagcttcatggggcagctgctgcagttcgagtcccaggtgctggccacgtcctgtgctgcggaggctgctagcccctcgggacccctgcgggagcggggcaagacccccgccacccccacctcgcagttcgtcttcagctttccggtctccgtgggcgtgcactcggcccccagcagcctgccctacctgcacagccccatcaccacctctcccagctgttagagccgccctgggggccccagaaccagagctggctcccagcaagggtaggacgggccgcatgcgggcagaaagttgggactgagcagctgggagcaggcgaccgagctccttccccatcatttctccttggccaacgacgaggccagccagaatggcaataaggactccgaatacataataaaagcaaacagaacactccaacttagagcaataacggctgccgcagcagccagggaagaccttggtttggtttatgtgtcagtttcacttttccgatagaaatttcttacctcatttttttaagcagtaaggcttgaagtgatgaaacccacagatcctagcaaatgtgcccaaccagctttactaaagggggaggaagggagggcaaagggatgagaagacaagtttcccagaagtgcctggttctgtgtacttgtccctttgttgtcgttgttgtagttaaaggaatttcattttttaaaagaaatcttcgaaggtgtggttttcatttctcagtcaccaacagatgaataattatgcttaataataaagtatttattaagactttcttcagagtatgaaagtacaaaaagtctagttacagtggatttagaatatatttatgttgatgtcaaacagctgagcaccgtagcatgcagatgtcaaggcagttaggaagtaaatggtgtcttgtagatatgtgcaaggtagcatgatgagcaacttgagtttgttgccactgagaagcaggcgggttgggtgggaggaggaagaaagggaagaattaggtttgaattgctttttaaaaaaaaaagaaaagaaaaagacagcatctcactatgttgccaaggctcatcttgagaagcaggcgggttgggtgggaggaggaagaaagggaagaattaggtttgaattgcttttttaaaaaaaaa

SEQ ID NO: 353 - protein, 303 aa, Homo sapien
MGRKVHSNGSQFAEHSRSPRRTGRDCKPVRAPSMALGVSQLAGRSRCLCSESQGGYERFSSEYPEFCSKTKALAAIPPPVPPSATEPLDLGCSSCGTPLHDQGGPVEILPFLYLGSAYHAARRDMLDALGITALLNVSSDCPNHFEGHYQYKCIPVEDNHKADISSWFMEAIEYIDAVKDCRGRVLVHCQAGISRSATICLAYLMMKKRVRLEEAFEFVKQRRSIISPNFSFMGQLLQFESQVLATSCAAEAASPSGPLRERGKTPATPTSQFVFSFPVSVGVHSAPSSLPYLHSPITTSPSC

SEQ ID NO: 354 - DNA, 1446 bp, Homo sapien
ctgccatttaggacaagctggatgatgatggtttgatagctccaggggttcgtgtataggagatgatgaatctgcttcatccagaatcacaatcttaaaaggcgggaactgaggcgactgtggggacatcagtgatcgtaagtctcctgggcccgttattctcagattaggtgacggagctaagacttcgagaccatctcgtcctttttgtatcgcggaaacctgaggaacgagccggcggcggtgacctgcacgagaagccaggctaactgggtgaagtaccatgcaagcatttcttaaaggtacatccatcagtactaaacccccgctgaccaaggatcgaggagtagctgccagtgcgggaagtagcggagagaacaagaaagccaaacccgttccctgggtggaaaaatatcgcccaaaatgtgtggatgaagttgctttccaggaagaagtggttgcagtgctgaaaaaatctttagaaggagcagatcttcctaatctcttgttttacggaccacctggaactggaaaaacatccactattttggcagcagctagagaactctttgggcctgaacttttccgattaagagttcttgagttaaatgcatctgatgaacgtggaatacaagtagttcgagagaaagtgaaaaattttgctcaattaactgtgtcaggaagtcgctcagatgggaagccgtgtccgccttttaagattgtgattctggatgaagcagattctatgacctcagctgctcaggcagctttaagacgtaccatggagaaggagtcgaaaaccacccgattctgtcttatctgtaactatgtcagtcgaataattgaacccctgacctctagatgttcaaaattccgcttcaagcctctgtcagataaaattcaacagcagcgattactagacattgccaagaaggaaaatgtcaaaattagtgatgagggaatagcttatcttgttaaagtgtcagaaggagacttaagaaaagccattacatttcttcaaagcgctactcgattaacaggtggaaaggagatcacagagaaagtgattacagacattgctggggtaataccagctgagaaaattgatggagtatttgctgcctgtcagagtggctcttttgacaaactagaagctgtggtcaaggatttaatagatgagggtcatgcagcaactcagctcgtcaatcaactccatgatgtggttgtagaaaataacttatctgataaacagaagtctattatcacagaaaaacttgccgaagttgacaaatgcctagcagatggtgctgatgaacatttgcaactcatcagcctttgtgcaactgtgatgcagcagttatctcagaattgttaacgtgatatatctggatggggggttttgtaaataatgaagttgtaataaaaataaaatgaccaaaagcaccg

SEQ ID NO: 355 - protein, 363 aa, Homo sapien
MQAFLKGTSISTKPPLTKDRGVAASAGSSGENKKAKPVPWVEKYRPKCVDEVAFQEEVVAVLKKSLEGADLPNLLFYGPPGTGKTSTILAAARELFGPELFRLRVLELNASDERGIQVVREKVKNFAQLTVSGSRSDGKPCPPFKIVILDEADSMTSAAQAALRRTMEKESKTTRFCLICNYVSRIIEPLTSRCSKFRFKPLSDKIQQQRLLDIAKKENVKISDEGIAYLVKVSEGDLRKAITFLQSATRLTGGKEITEKVITDIAGVIPAEKIDGVFAACQSGSFDKLEAVVKDLIDEGHAATQLVNQLHDVVVENNLSDKQKSIITEKLAEVDKCLADGADEHLQLISLCATVMQQLSQNC

SEQ ID NO: 356 - DNA, 1658 bp, Homo sapien
ggcacgagctcggctcctggaaagatggaggcagcggagacagaggcggaagctgcagccctagaggtcctggctgaggtggcaggcatcttggaacctgtaggcctgcaggaggaggcagaactgccagccaagatcctggttgagtttgtggtggactctcagaagaaagacaagctgctctgcagccagcttcaggtagcggatttcctgcagaacatcctggctcaggaggacactgctaagggtctcgaccccttggcttctgaagacacgagccgacagaaggcaattgcagctaaggaacaatggaaagagctgaaggccacctacagggagcacgtagaggccatcaaaattggcctcaccaaggccctgactcagatggaggaagcccagaggaaacggacacaactccgggaagcctttgagcagctccaggccaagaaacaaatggccatggagaaacgcagagcagtccagaaccagtggcagctacaacaggagaagcatctgcagcatctggcggaggtttctgcagaggtgagggagcgtaagacagggactcagcaggagcttgacagggtgtttcagaaacttggaaacctgaagcagcaggcagaacaggagcgggacaagctgcagaggtatcagaccttcctccagcttctgtataccctgcagggtaagctgttgttccctgaggctgaggctgaggcagagaatcttccagatgataaaccccagcagccgactcgaccccaggagcagagtacaggagacaccatggggagagaccctggtgtgtccttcaaggctgttggtctacaacctgctggagatgtaaatttgccatgacttcctggaggacagcagcatggagaaagatcctagaaaaggcctctgacttccctcacctcccaaccatcattacaggaaagactgtgaactcctgagttcagcttgatttctgactacatcccagcaagctctggcatctgtggattaaaatccctggatctctctcagttgtgtatttgttcatcttcatatgctggcaggaacaactattaatacagatactcagaagccaataacatgacaggagctgggactggtttgaacacagggtgtgcagatggggagggggtactggccttgggcctcctatgatgcagacatggtgaatttaattcaaggaggaggagaatgttttaggcaggtggttatatgtgggaagataattttattcatggatccaaatgtttgttgagtcctttctttgtgctaaggttcttgcggtgaaccagaattataacagtgagctcatctgactgttttaggatgtacagcctagtgttaacattcttggtatctttttgtgccttatctaaaacatttctcgatcactggtttcagatgttcatttattatattcttttcaaagattcagagattggcttttgtcatccactattgtatgttttgtttcattgacctctagtgataccttgatctttcccactttctgttttcggattggagaagatgtaccttttttgtcaactcttacttttatcagatgatcaactcacgtatttggatctttatttgttttctcaaataaatatttaaggttaaaaaaaaaaaaaaaaaaa

SEQ ID NO: 357 - protein, 277 aa, Homo sapien
MEAAETEAEAAALEVLAEVAGILEPVGLQEEAELPAKILVEFVVDSQKKDKLLCSQLQVADFLQNILAQEDTAKGLDPLASEDTSRQKAIAAKEQWKELKATYREHVEAIKIGLTKALTQMEEAQRKRTQLREAFEQLQAKKQMAMEKRRAVQNQWQLQQEKHLQHLAEVSAEVRERKTGTQQELDRVFQKLGNLKQQAEQERDKLQRYQTFLQLLYTLQGKLLFPEAEAEAENLPDDKPQQPTRPQEQSTGDTMGRDPGVSFKAVGLQPAGDVNLP

SEQ ID NO: 358 - DNA, 768 bp, Homo sapien
ccttcagcataaaagctgatccacaaacaagaggagcaccagacctcctcttggcttcgagatggcttcgccacaccaagagcccaaacctggagacctgattgagattttccgccttggctatgagcactgggccctgtatataggagatggctacgtgatccatctggctcctccaagtgagtaccccggggctggctcctccagtgtcttctcagtcctgagcaacagtgcagaggtgaaacgggggcgcctggaagatgtggtgggaggctgttgctatcgggtcaacaacagcttggaccatgagtaccaaccacggcccgtggaggtgatcatcagttctgcgaaggagatggttggtcagaagatgaagtacagtattgtgagcaggaactgtgagcactttgtcgcccagctgagatatggcaagtcccgctgtaaacaggtggaaaaggccaaggttgaagtcggtgtggccacggcgcttggaatcctggttgttgctggatgctcttttgcgattaggagataccaaaaaaaagcaacagcctgaagcagccacaaaatcctgtgttagaagcagctgtgggggtcccagtggagatgagcctcccccatgcctccagcagcctgaccctcgtgccctgtctcaggcgttctctagatcctttcctctgtttccctctctcgctggcaaaagtatgatctaattgaaacaagactgaaggatcaataaacagccatctgccccttcaaaaaaaaaaa

SEQ ID NO: 359 - protein, 164 aa, Homo sapien
MASPHQEPKPGDLIEIFRLGYEHWALYIGDGYVIHLAPPSEYPGAGSSSVFSVLSNSAEVKRGRLEDVVGGCCYRVNNSLDHEYQPRPVEVIISSAKEMVGQKMKYSIVSRNCEHFVAQLRYGKSRCKQVEKAKVEVGVATALGILVVAGCSFAIRRYQKKATA

SEQ ID NO: 360 - DNA, 10709 bp, Homo sapien
agggggcggcgctcccggcccatcccttagccccgcggcggccgtgtgggccggaggctgcctgcaccgcgtcagggaggccggcctagaaaccctccctcccagaagaaagccgatcccagttcaggtggggtcttcctcggttgcgtacctggctggagccgagctggtgggcggccggcagccggcgtttctggtgatgacagccccgaaatgaaagcagcgcggccgccgcctccgagggctgcagggagatcagcgtccagcaaataagaagcaagtcctggacccggaggaggaggagcggccgagcatctctctctgctccgccgtgtcctttagatgagcactcccggccggagccggaggtggatccgcagagctgcctctgggcgcctgaccccgcgctgacatcacaacctgtgacaggcgcatcacgcccggtacctgctcccggccgctgcccgtcctcccagcctctttgtatgccgcagacatggccagccagcaggattcgggcttctttgagatcagtatcaaatatttactgaaatcctggagtaatacttctcccgttggcaacggttacatcaagcctccggttccacctgcttctggcacgcacagggagaaagggccgccaaccatgctacccatcaatgtggacccagacagtaaaccaggagaatatgtcctcaaaagtttatttgtcaacttcaccactcaggctgaacgcaagattcgtatcattatggcagagcccctggaaaagccattgacgaaatctctgcaacgtggagaagacccccaatttgatcaggtcatcagctcaatgagctccctttctgagtactgcctgccttccattctacgtacattatttgactggtataaaaggcaaaatggcattgaggatgaatcacatgaatacagaccaagaacaagcaataaatcaaaaagcgatgaacaacagcgagattatttaatggaaagacgggacctcgccattgattttattttttctttagtattaatagaagttttgaaacagattccacttcatcctgtaatagacagtttaatacatgatgttattaacttggctttcaagcactttaaatacaaagaagggtaccttggtcccaacactggcaatatgcatattgtggcagacctgtatgcagaagtcattggagtgttggcacaagccaaattccctgctgtaaagaagaaatttatggcggagctaaaagaattacggcacaaagagcagaacccatatgtggttcaaagcattatcagcttaataatgggcatgaaattctttcgaattaagatgtatccagtggaggattttgaggcctctcttcagtttatgcaggaatgtgcacattacttcctcgaggtcaaagacaaagatatcaagcatgccttggctgggctttttgttgaaatacttgttccagttgctgctgctgttaaaaatgaagtaaatgttccctgccttagaaattttgtggaaagcctgtatgacaccacgctggaactttcttctcgaaagaagcattccttggccttgtaccccctggtgacctgtttgctctgtgtcagtcagaagcagctgttcctgaacaggtggcacattttcctcaacaactgcttgtccaaccttaaaaacaaagatcccaagatggctcgagttgcactggaatctctctacagattactttgggtttacatgattcgaattaaatgtgaaagcaacacagctactcagagccgacttataaccatcatcacaacacttttccccaaagggtcccgcggtgtggtaccaagggacatgcctctgaacatctttgtgaaaatcatccagttcattgcccaggaacgtttagattttgcaatgaaagaaatcattttcgattttctttgtgtgggaaaaccagcaaaagcattcagtctcaacccagagagaatgaacattggtttacgggcattcttggtcatagctgatagcttgcagcagaaagatggggaacctcccatgccggttacaggagccgttcttccttcaggaaacacgttaagagtaaagaaaacatatttgagtaaaacactaactgaagaggaagccaaaatgataggcatgtccttatattactctcaagtacgaaaagctgtagacaacattttaaggcaccttgataaagaagtaggaaggtgtatgatgctgactaatgtacagatgttaaacaaagaaccggaagacatgatcacgggtgagagaaagccaaaaatagatcttttcaggacctgtgttgctgctattcctcgactgcttcctgatgggatgtcaaaacttgaacttattgacttactggctaggctctctattcatatggatgatgaattgcgacatattgcacaaaattctcttcagggtttacttgttgacttctcagattggagggaagatgtactatttggctttaccaacttcctgctccgggaagtaaatgatatgcatcacacactccttgattcgtccctgaagttgctgctgcagctgctcacccagtggaaactagtcatccagacacaaggaaaagtctatgaacaagccaacaaaatcagaaattcagagctcatcgcaaatggctccagtcacagaattcagtcggaacgaggtccccactgcagtgtactccacgctgtagaaggttttgctctggttttactctgcagtttccaggtggccacacgcaaactgtccgttttaatactcaaggaaattcgagcgttgtttattgccctggggcagcctgaggatgacgacaggccgatgattgatgtcatggatcagctaagttcttccattctagaaagttttattcatgtagcagtttcggattcagcaacattaccactcacccacaatgtggatctgcagtggttggtggaatggaacgcagtcctggtcaatagccattatgatgtgaaaagcccttcccatgtctggatatttgcacagtctgtcaaagacccctgggtcctctgcctcttcagcttcctccggcaggagaacttacccaagcactgccccacagccctcagctatgcctggccttatgccttcactcggctccagtcggtgatgcctctggtggacccaaatagcccaattaatgccaagaaaaccagcactgccggcagcggagacaactatgttactttgtggagaaattacctaattctttgttttggagttgcaaaacccagtattatgagcccaggacacttaagagcttccactccagaaataatggcgaccacacctgatggtacagtgagctacgataacaaggccataggcaccccatcggtgggagttctgttaaagcagttggtgcctttgatgagactagagagcattgagatcacagagtccttagttttaggatttggaagaacaaattcccttgttttcagagaattggtagaagaacttcatccattaatgaaagaagctctggaaagaagaccagagaacaagaaacgccgagaacggcgagacttgttaaggctacaactacttcgaatttttgaacttttggctgatgctggtgtaataagtgacagcacaaatggagccctagagcgggatactttagccctgggagctttgttcttagaatatgtggacttgacccgcatgctcctagaagctgaaaatgacaaagaagttgaaattcttaaagatatccgggcacattttagtgcaatggtggccaacttgattcagtgtgttccagttcaccaccgaagatttctcttcccccagcaaagtctgaggcaccaccttttcatcttattcagccagtgggcaggacccttcagcattatgttcactcctctggatcgttacagtgacagaaatcatcagattacaagatatcagtattgtgcattaaaagcaatgtcagcagtactgtgctgtggccctgtctttgacaatgtgggcctttccccagatggctacctatataaatggcttgacaacattctggcttgtcaagatttacgagttcatcaacttggctgcgaagttgttgtcttgctactggaacttaatcctgaccaaataaatctttttaactgggcaattgaccgatgctacacaggttcctaccaacttgcatctggctgcttcaaagccatagcaactgtgtgtggaagcaggaactatcccttcgacatagtgacattgttaaaccttgttctattcaaggcctctgacaccaacagagagatttatgaaatctccatgcagctcatgcagatccttgaagcaaagctttttgtatactcaaagaaagtcgctgagcaaagaccgggaagtattctctatggaacacacggcccgctgccacccctctacagcgtgtcactcgccctcttgtcatgtgagctggccaggatgtaccctgagctcacactccccctcttctcaggtaagccagcgattccccacaacacaccccaacgggcgccagatcatgcttacctacctgctgccctggctgcacaacatcgagctggtggacagcaggctcctcctcccgggtcgagccccagcagcccagaggacgaagtcaaggaccgggaaggtgacgtgactgcttctcacgggctgagaggaaatggctggggctctccagaagccacgtcactggtcctgaacaacctcatgtacatgacggccaagtatggagatgaagttcctgggccagaaatggaaaatgcttggaatgctttagccaacaatgagaaatggagcaacaacctgaggatcaccttgcagttcctgattagcctctgtggggtcagcagcgacacagttctcctaccctatattaaaaaagtggcaatatacttgtgccgtaacaacaccattcaaaccatggaagagcttctctttgagctgcagcagacagaacccgtgaaccccatcgtccagcattgtgacaacccgcccttctaccgcttcacggccagtagcaaggcttccgcagcagcctcaggaaccacctctagcagcaatacagtggttgctggccaggaaaatttcccagatgctgaggagaacaagatattgaaagaatctgatgaaaggtttagtaatgtcatcagagcccacactcgcctcgagtcaagatacagcaatagctctggaggatcctacgatgaagataaaaatgatccaatttctccctacacgggctggttgctgactattacagagaccaagcagccgcagcccttaccgatgccttgtactggaggatgctgggcccccctggttgactatctcccggagaccatcactccccgggggccactccacaggtgcaatattgctgtaatttttatgactgaaatggtggtggatcacagtgtacgagaagactgggcgcttcatctaccattattacttcatgctgtcttcttaggtttagaccactaccggcctgaagtctttgaacacagcaaaaaactgcttcttcacctcttgattgccctctcttgcaacagcaatttccattccattgcttccgtgctcctgcagacccgagagatgggtgaagctaagactctaaccgtgcagccagcctaccaacctgaatatctctatacaggtggctttgacttcctgagagaggaccagtcatccccggtgcctgactcagggcttagttcaagctccacctcctctagcatcagtctgggaggcagcagtggaaacctcccacagatgacccaggaggtagaagatgtggacacagctgctgaaacagatgagaaggcaaacaagctcattgagtttctcacgaccagggcatttggtccactttggtgccatgaagacatcacacctaaaaatcaaaattcaaagagtgctgaacagctcactaattttctacgtcacgttgtatctgtatttaaagattccaaatcaggcttccatctggagcaccagttgagtgaagttgcattgcagacagccctcgcaagctcttcaaggcactatgctggtcggtccttccagatattccgggccctcaagcaacctctgtcagcacatgccttatctgaccttctctcaagattggtggaggtgataggagaacatggagatgagattcagggttatgtaatggaagcgctcctaaccttggaggcggctgtggataacttgtctgactgcttgaagaacagtgacctcctaactgtattgtcccgctcttcctcaccagatttaagctccagcagtaaactaacagcaagcagaaagagcacaggacaactaaacatgaacccgggaaccaccagcggcaacaccgcaactgccgaacggagccggcatcaacgaagcttctctgtgcccaagaagtttggtgtcatcgaccgatcctctgacccacctcgaagtgccacactggacagaattcaggcttgtacccaacaaggcctctcctcaaaaaccagaagctcatcctccttgaaggacagtctcacggacccatcccacataaaccatcccaccaacctgctggccaccatattctgggtcacagtggccttgatggagtctgattttgagtttgaatacttaatggccttaaggctgttgagcagactactggcacatatgccactcgataaggctgagaaccgagaaaagcttgagaaactccaggcacagctgaagtgggccgacttctccgggctgcagcagctgctgctgaaaggattcacatccctcaccaccacagacctgaccctgcagctcttcagtctgctgacaccagtgtccaaaatatccatggtggatgcatcccacgctattgggtttccactgaatgtcttgtgtctcctgcctcagctgattcagcattttgaaaatcccaatcagttctgtaaggatatagccgaaaggattgctcaggtttgtttagaagagaagaaccccaaactttcaaatcttgcacatgtcatgactctttataaaacgcacagctacacgagggactgtgccacgtgggtcaatgtggtctgtcgataccttcatgaagcatatgctgacattaccttgaatatggttacctacctggcagagctgctggagaagggcctccctagtgtgcagcagcccctgctccaggtgatctacagtcttctcagctacatggacctttctgtcgttcctgtcaaacagttcaatgtggaagttctgaagacaattgaaaaatatgtgcaaagtgttcactggagagaagctctgaatatcttgaagctggtagtttctcggtcagccagccttgttttaccttcataccagcacagtgacctctcaaaaatagaaatacatcgagtgtggactagtgcttccaaggaattacctgggaaaaccctggacttccacttcgatatttcggagactccaatcatcgggaggcggtatgatgagctgcagaattcttctgggcgtgatgggaagcccagggccatggccgtcacccggagcacatcttccacttcctcaggctccaactccaacgtccttgttccagtgagctggaaaaggccccagtattctcagaagagaacaaaagagaagttggtacatgtcctttctctgtgtggccaagaagtaggattgagcaaaaatccatcagtgattttttcatcgtgtggggatctggatctgcttgagcaccagacaagcttggtatcttctgaggacggtgcccgagagcaggagaacatggatgacacaaacagcgagcagcagtttagagtcttcagagacttcgacttcctagatgtggagctggaggatggagagggtgagagtatggacaatttcaactggggagtgcgcagacgttctctggacagcctggataagtgtgatatgcagattctggaggagcgccaactgtcaggaagcactcctagcctgaataaaatgcaccatgaggactccgatgaatcatccgaggaggaggacctcacagccagccagatcctggagcactcagacctaatcatgactctctccccctctgaagagacgaatcccatggagctgctcaccacagcctgtgactcgacccctgcagaacctcattcctttaacaccagaatgtccagctttgatgcttccttgcctgatatgaataatctgcagatttctgagggttcaaaggctgaagctgttcgtgaggaggaggacaccaccgtgcatgaggatgatctttctagttccatcaatgaactcccagcagcttttgaatgcagcgacagctttagcctggacatgactgagggggaagaaaaaggcaatcgggcactggaccagtttaccctggcgagctttggagaaggtgacaggggagtctctccccctccctcgcccttcttctcagccatccttgccgcctttcagcccgcagcctgtgacgatgccgaggaggcctggcgcagccacatcaaccagcttatgtgtgactcagatggctcctgtgctgtgtatacatttcatgtgttctcctccttgtttaagaatattcagaaaaggttctgcttcctaacctgtgatgcagccagttaccttggagataacctccggggaatcggatccaaatttgtcagctcttcccagatgctcacctcctgctctgaatgtcctacactttttgtggatgccgagactctcctttcatgtggacttctggacaagctcaagttcagtgtgttagaactgcaagaatatttggatacctacaacaacaggaaagaggccacactctcttggcttgcaaattgtaaggcaacatttgcagggggatcaagagatggagtaattacctgtcaaccaggggactccgaagaaaagcaattggaactgtgtcagagattatataagctacacttccagctgctattgctttttcagtcctactgtaagctcatcggccaggtgcacgaagttagctccatgccagagctgctgaatatgtccagggaactgagtgacctaaagaaacacctgaaggaagccagtgcagtcattgcagctgaccctctctattcagacggcgcgtggtccgagcccaccttcacgtccactgaagcagccatccagtccatgctggagtgcctgaagaacaacgaactcggcaaagctttgcggcagatcagggagtgcagaagtctgtggcccaatgacatctttggaagcagttctgatgatgaggtccagacactactgaatatttatttccgtcaccaaactctgggacagacgggtacttatgccctggtggggtctaaccagagcctgaccgagatctgcaccaagctgatggagctgaacatggagatccgggacatgatccgcagggcccagagttaccgagtcctcactacttttcttccagactccagtgtttctggcactagtctctgacaggagcctcctgtccccactgggttccaaactgcagtgctgccatgctggggcaacgtcattcagtgtcttctcggccttcaaaaggcttggacagactgttctccctcttgttacctgtagggctttttctaaagaggatggcagaacttccaacgtgtagcaatactataagaaccaaggtagcttagaacgtcctggacagactccactcatcatgctgtgtggcacaaatgtgttacatttgaccgagcatatgcaactcgctactgaagaagtgacttccgttgcataccaaagccgactacactgaacagtaccttcctttctagaaacaattttagattggcaaaagtgcaatgttttcttcactcaaaaaattttatattctcaaacatgtatattctttccctgtcttgttccattttcttttcttttttcttttttctttttcctttctttcgtgggctgagaaaggggcaggcaaaatgaagctggccactgaaaactgtaagatggtcaaaagctgacagcctgtgtatgtgaaaagggaattgtaaatggactgcaatgtaatgtacactgtaatttgaatacaattactgtatctaaaaggagctgctatgaagtacctttcttatgttgctaggctactgtttctgaaagccctggatctctttgcaccaaaaatggtccagatagactctttttaaggatcttggctgctttttactagaaggttgcttttatgagcatatttatactgctgaaggatgagtgttaattttaattaactttgccgttttgtagagaaaactattcacaagataaattccaagtcttttcacctgtcaggcatgcatattttaatatctgtttggatagtcagaagtagaatcataaaggtaaaatatgagttgttactttgtttcttcgatgtcatattttatgtgtaatatatatgtaaagggccattcttaagttctctccttaaacttaatgctgtcaagtgttagatgtgtgcatgtgaacttgttgcactgcagaaacatattcagagtttatctatgtaacttattcactctgtaaatacatttaaagtttttgtgatgtaagcttaattgatattctgttcagaactttctttagactaaaaaaaaaaaaaaaagacaaa

SEQ ID NO: 361 - protein, 2000 aa, Homo sapien
MASQQDSGFFEISIKYLLKSWSNTSPVGNGYIKPPVPPASGTHREKGPPTMLPINVDPDSKPGEYVLKSLFVNFTTQAERKIRIIMAEPLEKPLTKSLQRGEDPQFDQVISSMSSLSEYCLPSILRTLFDWYKRQNGIEDESHEYRPRTSNKSKSDEQQRDYLMERRDLAIDFIFSLVLIEVLKQIPLHPVIDSLIHDVINLAFKHFKYKEGYLGPNTGNMHIVADLYAEVIGVLAQAKFPAVKKKFMAELKELRHKEQNPYVVQSIISLIMGMKFFRIKMYPVEDFEASLQFMQECAHYFLEVKDKDIKHALAGLFVEILVPVAAAVKNEVNVPCLRNFVESLYDTTLELSSRKKHSLALYPLVTCLLCVSQKQLFLNRWHIFLNNCLSNLKNKDPKMARVALESLYRLLWVYMIRIKCESNTATQSRLITIITTLFPKGSRGVVPRDMPLNIFVKIIQFIAQERLDFAMKEIIFDFLCVGKPAKAFSLNPERMNIGLRAFLVIADSLQQKDGEPPMPVTGAVLPSGNTLRVKKTYLSKTLTEEEAKMIGMSLYYSQVRKAVDNILRHLDKEVGRCMMLTNVQMLNKEPEDMITGERKPKIDLFRTCVAAIPRLLPDGMSKLELIDLLARLSIHMDDELRHIAQNSLQGLLVDFSDWREDVLFGFTNFLLREVNDMHHTLLDSSLKLLLQLLTQWKLVIQTQGKVYEQANKIRNSELIANGSSHRIQSERGPHCSVLHAVEGFALVLLCSFQVATRKLSVLILKEIRALFIALGQPEDDDRPMIDVMDQLSSSILESFIHVAVSDSATLPLTHNVDLQWLVEWNAVLVNSHYDVKSPSHVWIFAQSVKDPWVLCLFSFLRQENLPKHCPTALSYAWPYAFTRLQSVMPLVDPNSPINAKKTSTAGSGDNYVTLWRNYLILCFGVAKPSIMSPGHLRASTPEIMATTPDGTVSYDNKAIGTPSVGVLLKQLVPLMRLESIEITESLVLGFGRTNSLVFRELVEELHPLMKEALERRPENKKRRERRDLLRLQLLRIFELLADAGVISDSTNGALERDTLALGALFLEYVDLTRMLLEAENDKEVEILKDIRAHFSAMVANLIQCVPVHHRRFLFPQQSLRHHLFILFSQWAGPFSIMFTPLDRYSDRNHQITRYQYCALKAMSAVLCCGPVFDNVGLSPDGYLYKWLDNILACQDLRVHQLGCEVVVLLLELNPDQINLFNWAIDRCYTGSYQLASGCFKAIATVCGSRNYPFDIVTLLNLVLFKASDTNREIYEISMQLMQILEAKLFVYSKKVAEQRPGSILYGTHGPLPPLYSVSLALLSCELARMYPELTLPLFSGKPAIPHNTPQRAPDHAYLPAALAAQHRAGGQQAPPPGSSPSSPEDEVKDREGDVTASHGLRGNGWGSPEATSLVLNNLMYMTAKYGDEVPGPEMENAWNALANNEKWSNNLRITLQFLISLCGVSSDTVLLPYIKKVAIYLCRNNTIQTMEELLFELQQTEPVNPIVQHCDNPPFYRFTASSKASAAASGTTSSSNTVVAGQENFPDAEENKILKESDERFSNVIRAHTRLESRYSNSSGGSYDEDKNDPISPYTGWLLTITETKQPQPLPMPCTGGCWAPLVDYLPETITPRGPLHRCNIAVIFMTEMVVDHSVREDWALHLPLLLHAVFLGLDHYRPEVFEHSKKLLLHLLIALSCNSNFHSIASVLLQTREMGEAKTLTVQPAYQPEYLYTGGFDFLREDQSSPVPDSGLSSSSTSSSISLGGSSGNLPQMTQEVEDVDTAAETDEKANKLIEFLTTRAFGPLWCHEDITPKNQNSKSAEQLTNFLRHVVSVFKDSKSGFHLEHQLSEVALQTALASSSRHYAGRSFQIFRALKQPLSAHALSDLLSRLVEVIGEHGDEIQGYVMEALLTLEAAVDNLSDCLKNSDLLTVLSRSSSPDLSSSSKLTASRKSTGQLNMNPGTTSGNTATAERSRHQRSFSVPKKFGVIDRSSDPPRSA

SEQ ID NO: 362 - DNA, 696 bp, Homo sapien
ttccccccccccccccccccccccgcccgagcacaggacacagctgggttctgaagcttctgagttctgcagcctcacctctgagaaaacctcttttccaccaataccatgaagctctgcgtgactgtcctgtctctcctcatgctagtagctgccttctgctctccagcgctctcagcaccaatgggctcagaccctcccaccgcctgctgcttttcttacaccgcgaggaagcttcctcgcaactttgtggtagattactatgagaccagcagcctctgctcccagccagctgtggtattccaaaccaaaagaagcaagcaagtctgtgctgatcccagtgaatcctgggtccaggagtacgtgtatgacctggaactgaactgagctgctcagagacaggaagtcttcagggaaggtcacctgagcccggatgcttctccatgagacacatctcctccatactcaggactcctctccgcagttcctgtcccttctcttaatttaatcttttttatgtgccgtgttattgtattaggtgtcatttccattatttatattagtttagccaaaggataagtgtcctatggggatggtccactgtcactgtttctctgctgttgcaaatacatggataacacatttgattctgtgtgttttccataataaaactttaaaataaaatgcagacagtta

SEQ ID NO: 363 - protein, 92 aa, Homo sapien
MKLCVTVLSLLMLVAAFCSPALSAPMGSDPPTACCFSYTARKLPRNFVVDYYETSSLCSQPAVVFQTKRSKQVCADPSESWVQEYVYDLELN

SEQ ID NO: 364 - DNA, 1932 bp, Homo sapien
ggcacgaggcctcgtgccgccgggctcttggtacctcagcgcgagcgccaggcgtccggccgccgtggctatgttcgtgtccgatttccgcaaagagttctacgaggtggtccagagccagagggtccttctcttcgtggcctcggacgtggatgctctgtgtgcgtgcaagatccttcaggccttgttccagtgtgaccacgtgcaatatacgctggttccagtttctgggtggcaagaacttgaaactgcatttcttgagcataaagaacagtttcattattttattctcataaactgtggagctaatgtagacctattggatattcttcaacctgatgaagacactatattctttgtgtgtgacacccataggccagtcaatgtcgtcaatgtatacaacgatacccagatcaaattactcattaaacaagatgatgaccttgaagttcccgcctatgaagacatcttcagggatgaagaggaggatgaagagcattcaggaaatgacagtgatgggtcagagccttctgagaagcgcacacggttagaagaggagatagtggagcaaaccatgcggaggaggcagcggcgagagtgggaggcccggagaagagacatcctctttgactacgagcagtatgaatatcatgggacatcgtcagccatggtgatgtttgagctggcttggatgctgtccaaggacctgaatgacatgctgtggtgggccatcgttggactaacagaccagtgggtgcaagacaagatcactcaaatgaaatacgtgactgatgttggtgtcctgcagcgccacgtttcccgccacaaccaccggaacgaggatgaggagaacacactctccgtggactgcacacggatctcctttgagtatgacctccgcctggtgctctaccagcactggtccctccatgacagcctgtgcaacaccagctataccgcagccaggttcaagctgtggtctgtgcatggacagaagcggctccaggagttccttgcagacatgggtcttcccctgaagcaggtgaagcagaagttccaggccatggacatctccttgaaggagaatttgcgggaaatgattgaagagtctgcaaataaatttgggatgaaggacatgcgcgtgcagactttcagcattcattttgggttcaagcacaagtttctggccagcgacgtggtctttgccaccatgtctttgatggagagccccgagaaggatggctcagggacagatcacttcatccaggctctggacagcctctccaggagtaacctggacaagctgtaccatggcctggaactcgccaagaagcagctgcgagccacccagcagaccattgccagctgcctttgcaccaacctcgtcatctcccaggggcctttcctgtactgctctctcatggagggcactccagatgtcatgctgttctctaggccggcatccctaagcctgctcagcaaacacctgctcaagtcctttgtgtgttcgacaaagaaccggcgctgcaaactgctgcccctggtgatggctgcccccctgagcatggagcatggcacagtgaccgtggtgggcatccccccagagaccgacagctcggacaggaagaacttttttgggagggcgtttgagaaggcagcggaaagcaccagctcccggatgctgcacaaccattttgacctctcagtaattgagctgaaagctgaggatcggagcaagtttctggacgcacttatttccctcctgtcctaggaatttgattcttccagaatgaccttcttatttatgtaactggctttcatttagattgtaagttatggacatgatttgagatgtagaagccattttttattaaataaaatgcttattttaggctccgtccccaaaaaaaaaaaaaaaaaaaaaaaaaaaaa

SEQ ID NO: 365 - protein, 566 aa, Homo sapien
MFVSDFRKEFYEVVQSQRVLLFVASDVDALCACKILQALFQCDHVQYTLVPVSGWQELETAFLEHKEQFHYFILINCGANVDLLDILQPDEDTIFFVCDTHRPVNVVNVYNDTQIKLLIKQDDDLEVPAYEDIFRDEEEDEEHSGNDSDGSEPSEKRTRLEEEIVEQTMRRRQRREWEARRRDILFDYEQYEYHGTSSAMVMFELAWMLSKDLNDMLWWAIVGLTDQWVQDKITQMKYVTDVGVLQRHVSRHNHRNEDEENTLSVDCTRISFEYDLRLVLYQHWSLHDSLCNTSYTAARFKLWSVHGQKRLQEFLADMGLPLKQVKQKFQAMDISLKENLREMIEESANKFGMKDMRVQTFSIHFGFKHKFLASDVVFATMSLMESPEKDGSGTDHFIQALDSLSRSNLDKLYHGLELAKKQLRATQQTIASCLCTNLVISQGPFLYCSLMEGTPDVMLFSRPASLSLLSKHLLKSFVCSTKNRRCKLLPLVMAAPLSMEHGTVTVVGIPPETDSSDRKNFFGRAFEKAAESTSSRMLHNHFDLSVIELKAEDRSKFLDALISLLS

SEQ ID NO: 366 - DNA, 2331 bp, Homo sapien
gcgggattttcaagcgtaggcccccgggaactcgagctgccatgagcctctgggtggacaagtatcggccctgctccttgggacggctggactatcacaaggagcaggcggcccagctgcggaacctggtgcagtgtggtgactttcctcatctgttagtgtacggaccatcaggtgctggaaaaaagacaagaattatgtgtattctacgtgaactttatggtgttggagtggaaaaattgagaattgaacatcagaccatcacaactccatctaaaaaaaaaattgaaattagcaccattgcaagtaactaccaccttgaagttaatcctagtgatgctggaaatagtgaccgagtagtcattcaggagatgttgaaaacagtggcacaatcacaacaacttgaaacaaactctcaaagggattttaaagtggtattattgacagaagttgacaaactcaccaaagatgctcagcatgccttgcgaagaaccatggaaaaatatatgtctacctgcagattgatcttgtgctgcaattctacatctaaagtgatcccacctattcgtagtaggtgcttggcggttcgtgtgcctgctcccagcattgaagatatttgccacgtgttatctactgtgtgtaagaaggaaggtctgaatcttccttcacaactggctcatagacttgcagagaagtcttgtagaaatctcagaaaagccctgcttatgtgtgaagcctgcagagtgcaacaatatccttttactgcagatcaagaaatccctgagacagattgggaggtgtatctgagggagactgcaaatgctattgtcagtcagcaaactccacaaaggctccttgaagttcgtggaaggctgtatgagcttctaactcattgtattcctcctgagataataatgaagggccttctctcagaactgttacataattgtgatggacaactgaaaggggaggtggcacaaatggcagcttactatgagcatcgtctacagctgggtagcaaagccatttatcacttggaagcgtttgtggccaaattcatggcactttataagaagttcatggaggatggattggaaggcatgatgttctgacttctgtcagttattcttgcaaagatttctcagtatcagtatttacatacagcttatattaaaagagctgtgggtaaattaactgaacttaatcatgtcgtatttgcgtttttttggtaataacttctctgtgaactattaatcatcctctgagttaaataattgctcctatactattgaagtatgtagttttgtacataacttagagactttagagtctaagaaaatgatcttaatttactttaagcattggttattcaagtattcattgttgatcctcctattctcttccgtctaatctctcacctgctaaaggagatttacacattagaaagcaaagattattttcatttatccagatgaccattttctgccacaggtaacatgattgtttgacacaccattatatttaattctagtttctctcaatgaataattgtatttttgtaggaaatgtaagatttcattctgaaacataattattggtatggacaaaattgcagataccatttctgttgaggctgcagatttccaacttttatttcagtggttcagattagtattaggtcggtactaagaaataagcatgttttcactaatttaagtacttgagactcttgaagaaaattcagaatgaagttctggagaaaggtatgttactgtagtaattactctttgaacaggttttgtgttttgtcattagctctgccctttttaattaaatattttggttcatggaccaaagggtttacttgacaaatttgtgtgacagactccgaacaattcctttactacgaagtataatttataaaataaaatatacccattttaagggtacagtttgatttttgaccagtgaaactatgatcccaatcaaggtatagatgccgtcaccccaaaaagttccctccatatccctttgcagtcagttcatccctaccctggcccagatgatcactgatcttgtcattatagatgagttttgccagttcaagaatttaatggaatcagatattgtaagcattcttgtgtaatacttcattctctctcattattgagattcatccatattgttgaatgtttcactagttaatgtttattgttcaatatttttgtatatacttttaaagcctattcacttgctgatggatctttggtttgtttccaggtttggttattatgaataaagttgctgtgaataaaaaaaaaaaaaaaaaaa

SEQ ID NO: 367 - protein, 356 aa, Homo sapien
MSLWVDKYRPCSLGRLDYHKEQAAQLRNLVQCGDFPHLLVYGPSGAGKKTRIMCILRELYGVGVEKLRIEHQTITTPSKKKIEISTIASNYHLEVNPSDAGNSDRVVIQEMLKTVAQSQQLETNSQRDFKVVLLTEVDKLTKDAQHALRRTMEKYMSTCRLILCCNSTSKVIPPIRSRCLAVRVPAPSIEDICHVLSTVCKKEGLNLPSQLAHRLAEKSCRNLRKALLMCEACRVQQYPFTADQEIPETDWEVYLRETANAIVSQQTPQRLLEVRGRLYELLTHCIPPEIIMKGLLSELLHNCDGQLKGEVAQMAAYYEHRLQLGSKAIYHLEAFVAKFMALYKKFMEDGLEGMMF

SEQ ID NO: 368 - DNA, 1479 bp, Homo sapien
cgagctgccatgagcctctgggtggacaagtatcggccctgctccttgggacggctggactatcacaaggagcaggcggcccagctgcggaacctggtgcagtgtggtgactttcctcatctgttagtgtacggaccatcaggtgctggaaaaaagacaagaattatgtgtattttacgtgaactttatggtgttggagtggaaaaattgagaattgaacatcagaccatcacaactccatctaaaaaaaaaattgaaattagcaccattgcaagtaactaccaccttgaagttaatcctagtgatgctggaaatagtgaccgagtagtcattcaggagatgttgaaaacagtggcacaatcacaacaacttgaaacaaactctcaaagggattttaaagtggtattattgacagaagttgacaaactcaccaaagatgctcagcatgccttgcgaagaaccatggaaaaatatatgtctacctgcagattgatcttgtgctgcaattctacatctaaagtgatcccacctattcgtagtaggtgcttggcggttcgtgtgcctgctcccagcattgaagatatttgccacgtgttatctactgtgtgtaagaaggaaggtctgaatcttccttcacaactggctcatagacttgcagagaagtcttgtagaaatctcagaaaagccctgcttatgtgtgaagcctgcagagtgcaacaatatccttttactgcagatcaagaaatccctgagacagattgggaggtgtatctgagggagactgcaaatgctattgtcagtcagcaaactccacaaaggctccttgaagttcgtggaaggctgtatgagcttctaactcattgtattcctcctgagataataatgaagggccttctctcagaactgttacataattgtgatggacaactgaaaggggaggtggcacaaatggcagcttactatgagcatcgtctacagctgggtagcaaagccatttatcacttggaagcgtttgtggccaaattcatggcactttataagaagttcatggaggatggattggaaggcatgatgttctgacttctgtcagttattcttgcaaagatttctcagtatcagtatttacatacagcttatattaaaagagctgtgggtaaattaactgaacttaatcatgtcgtatttgggtttttttggtaataacttctctgtgaactattaatcatcctctgagttaaataattgctcctatactattgaagtatgtagttttgtacataacttagagactttagagtctaagaaaatgatcttaatttactttaagcattggttattcaagtattcattgttgatcctcctattctcttccgtctaatctctcacctgctaaaggagatttacacattagaaagcaaagattattttcatttatccagatgaccattttctgccacaggtaacatgattgtttgacgg

SEQ ID NO: 369 - protein, 356 aa, Homo sapien; identical to SEQ ID NO: 367

SEQ ID NO: 370 - DNA, 627 bp, Homo sapien
agtctccggcgagttgttgcctgggctggacgtggttttgtctgctgcgcccgctcttcgcgctctcgtttcattttctgcagcgcgccacgaggatggcccacaagcagatctactactcggacaagtacttcgacgaacactacgagtaccggcatgttatgttacccagagaactttccaaacaagtacctaaaactcatctgatgtctgaagaggagtggaggagacttggtgtccaacagagtctaggctgggttcattacatgattcatgagccagaaccacatattcttctctttagacgacctcttccaaaagatcaacaaaaatgaagtttatctggggatcgtcaaatctttttcaaatttaatgtatatgtgtatataaggtagtattcagtgaatacttgagaaatgtacaaatctttcatccatacctgtgcatgagctgtattcttcacagcaacagagctcagttaaatgcaactgcaagtaggttactgtaagatgtttaagataaaagttcttccagtcagtttttctcttaagtgcctgtttgagtttactgaaacagtttacttttgttcaataaagtttgtatgttgcatttaaaaaaaaaaaaaaa

SEQ ID NO: 371 - protein, 79 aa, Homo sapien
MAHKQIYYSDKYFDEHYEYRHVMLPRELSKQVPKTHLMSEEEWRRLGVQQSLGWVHYMIHEPEPHILLFRRPLPKDQQK

SEQ ID NO: 372 - DNA, 2957 bp, Homo sapien
gaattcccaaacgtgcacaggggagtgagggcagggcgctcgcagggggcacgcagggagggcccagggcgccagggaggccgcgccgggctaatccgaaggggctgcgaggtcaggctgtaaccgggtcaatgtgtggaatattggggggctcggctgcagacttggccaaatggacgggactattaaggaggctctgtcggtggtgagcgacgaccagtccctctttgactcagcgtacggagcggcagcccatctccccaaggccgacatgactgcctcggggagtcctgactacgggcagccccacaagatcaaccccctcccaccacagcaggagtggatcaatcagccagtgagggtcaacgtcaagcgggagtatgaccacatgaatggatccagggagtctccggtggactgcagcgttagcaaatgcagcaagctggtgggcggaggcgagtccaaccccatgaactacaacagctatatggacgagaagaatggcccccctcctcccaacatgaccaccaacgagaggagagtcatcgtccccgcagaccccacactgtggacacaggagcatgtgaggcaatggctggagtgggccataaaggagtacagcttgatggagatcgacacatcctttttccagaacatggatggcaaggaactgtgtaaaatgaacaaggaggacttcctccgcgccaccaccctctacaacacggaagtgctgttgtcacacctcagttacctcagggaaagttcactgctggcctataatacaacctcccacaccgaccaatcctcacgattgagtgtcaaagaagacccttcttatgactcagtcagaagaggagcttggggcaataacatgaattctggcctcaacaaaagtcctccccttggaggggcacaaacgatcagtaagaatacagagcaacggccccagccagatccgtatcagatcctgggcccgaccagcagtcgcctagccaaccctggaagcgggcagatccagctgtggcaattcctcctggagctgctctccgacagcgccaacgccagctgtatcacctgggaggggaccaacggggagttcaaaatgacggaccccgatgaggtggccaggcgctggggcgagcggaaaagcaagcccaacatgaattacgacaagctgagccgggccctccgttattactatgataaaaacattatgaccaaagtgcacggcaaaagatatgcttacaaatttgacttccacggcattgcccaggctctgcagccacatccgaccgagtcgtccatgtacaagtacccttctgacatctcctacatgccttcctaccatgcccaccagcagaaggtgaactttgtccctccccatccatcctccatgcctgtcacttcctccagcttctttggagccgcatcacaatactggacctcccccacggggggaatctaccccaaccccaacgtcccccgccatcctaacacccacgtgccttcacacttaggcagctactactagaagcttcttctagctgaagcccatcctgcacacttactggatgctttggactcaacaggacatatgtggccttgaagggaagacaaaactggatgttctttcttgttggatagaacctttgtatttgttctttaaaaacattttttttaatgttggtaacttttgcttcctctacctgaacaaagagatgaataattccatgggccagtatgccagtttgaattctcagtctcctagcatcttgtgagttgcatattaagattactggaatggttaagtcatggttctgagaaagaagctgtacgttttctttatgtttttatgaccaaagcagtttcttgtcaatacacggggttcagtatgacacagaatcatggacttaacccgtcatgttctggtttgagatttagtgacaaatagaggtgggaagcttataatctaattttaggaggaccaaattcagcggatggcaactggaacattgattgtaaggccagtgaagttttcacccaactggaatttgatggaaagaaggtttgtgtgtttaagacgccaagggcattgcagaatccctctcagtggacagtatgcactcagctgaccactctctctagaaatagtcaagatatgaactaagaaattttaatgcaaatacatacattcctgaaagacggggaattaaattactaattttttttttttaaatgatgacagtggtcccagaacttggaaaagttgtagggatttctaaactcaagcagattcgcaagtgctgtgcgcttgtcagaccatcagaccagggccaaccaatcagaaggcaacttactgtataaattatgcagagttattttcctatatctcacagtattaaaaaataaataattaaaaattaagaataaataaacgagttgacctcggtcacaaaagcagttttactatcgaatcaatcgctgttatttttttttaatgtaatttgtacatcttttttcaatctgtacatttgggctgtcttgtatgtttttatgctcctttttaaaaagcataatatgcctatagctgaaaaggaaacagggctgtttaagtcactgacttatgagaaagcaaagcactggtacagttatttaacaggcatacacaagcagggaaaagataatccatttagatctttaatgctttggaaatgcgtgtaacagtactgcaataatcacagctctgggaaaaacaacgaaactttcccttgtggagaggagggattttcctgctctatataagcaacatatttttagacattaaaatatatataattttgcaggtaattgttgacttttttaactatattaagtgttaagctgacaactgtcaaagaagaccatgttgtaaaataatttgactaaataaatggttccttctctcaaaaaaaaaaaaa

SEQ ID NO: 373 - protein, 452 aa, Homo sapien
MDGTIKEALSVVSDDQSLFDSAYGAAAHLPKADMTASGSPDYGQPHKINPLPPQQEWINQPVRVNVKREYDHMNGSRESPVDCSVSKCSKLVGGGESNPMNYNSYMDEKNGPPPPNMTTNERRVIVPADPTLWTQEHVRQWLEWAIKEYSLMEIDTSFFQNMDGKELCKMNKEDFLRATTLYNTEVLLSHLSYLRESSLLAYNTTSHTDQSSRLSVKEDPSYDSVRRGAWGNNMNSGLNKSPPLGGAQTISKNTEQRPQPDPYQILGPTSSRLANPGSGQIQLWQFLLELLSDSANASCITWEGTNGEFKMTDPDEVARRWGERKSKPNMNYDKLSRALRYYYDKNIMTKVHGKRYAYKFDFHGIAQALQPHPTESSMYKYPSDISYMPSYHAHQQKVNFVPPHPSSMPVTSSSFFGAASQYWTSPTGGIYPNPNVPRHPNTHVPSHLGSYY

SEQ ID NO: 374 - DNA, 4166 bp, Homo sapien
cggcgcgggtgttgagagcggtgtggtaggtgttgtagccgctatggtgaagttcgctttgtagcggccccggctagagagttggcctgttccctgcctttgtgacccggaggagcttttgggggtgcgtcaagcccctggcctgaggcagcgaactggtttgtggcctgtttgattcctgtcagaggtttgctgacccaagacagtatcgaaaatgcatattaagtcaattattctagagggattcaagtcctatgctcagaggaccgaagtcaatggttttgaccccctcttcaatgctatcactggcttaaatggtagtgggaaatccaacatattggactccatctgctttttactgggcatctccaacctgtctcaggttcgggcttctaatttacaagatttagtttacaaaaatgggcaggctggtattaccaaagcctctgtgtcaatcacttttgataattctgacaaaaagcaaagtcctttaggatttgaggttcatgatgaaatcacagtaacaaggcaggtggttattggtggtagaaataaatatttaatcaatggagtcaatgccaacaacaccagagtacaggatctcttctgttctgttggccttaatgttaacaaccctcactttctcatcatgcagggccgaattacaaaagtattgaatatgaaaccaccagagattttatccatgatagaagaagcagctggaaccaggatgtatgaatacaaaaaaatagctgcacagaaaactatagaaaaaaaggaggctaagctgaaagaaattaagacgatacttgaagaagagattactccaaccattcaaaaattaaaagaggaaagatcgtcctacttggagtaccaaaaagtaatgagagaaatagaacatttgagtcgtttatatattgcttatcagtttttgctggctgaagataccaaagtacgctcagctgaggaattaaaagaaatgcaagataaagttataaagcttcaggaagaattgtctgagaatgataaaaaaataaaagcacttaatcatgaaatagaagaattggaaaaaagaaaagataaggaaactggagttatacttcgatctttagaagatgctcttgcagaggctcagcgagttaatactaaatctcaaagcgcatttgatctcaagaagaaaaatctggcatgtgaggaaagcaaacgcaaagagctggaaaaaaatatggttgaggactcaaaaactttagcagcaaaggaaaaagaggttaaaaagataacagatggactgcatgcccttcaagaagcaagtaataaagatgctgaagctctggcagctgcacagcagcacttcaatgctgtttccgctggcctgtccagtaatgaagatggagcagaagcaactcttgctggtcaaatgatggcctgtaaaaatgatataagtaaagctcagacagaagccaaacaggctcagatgaagttgaagcatgctcaacaggaattaaagaataaacaagctgaagttaagaagatggatagtggctacaggaaggatcaagaagctctagaagctgtaaaaagacttaaagaaaaacttgaagctgaaatgaaaaagctaaattatgaagaaaataaagaggaaagccttttggaaaagcgcaggcagctgtctcgtgatattggtagattgaaagaaacatatgaagctctattagccagatttcccaatcttcgatttgcatacaaggatccagagaagaactggaatagaaattgtgtgaaaggacttgtggcttctctgattagtgtgaaagacacttctgcaaccacagctttagaattagtggctggagaacgactctacaatgttgtagtagacacagaagttactggtaaaaagctactagaaaggggggaactgaaacgtcgatacactataattccactcaataaaatttcagccagatgtattgcaccagaaactctgagagttgctcagaatcttgttggccctgacaacgttcatgtggctctttccttggttgaatataaaccagaacttcagaaagcaatggagtttgtctttggaacaacatttgtttgtgacaatatggataatgccaaaaaagtggcctttgataagaggataatgactagaactgtaactctcggaggtgatgtgtttgatcctcatgggacattgagtggaggtgctcgatcccaggcagcttccattttaaccaagtttcaagaactcaaagatgttcaggatgaactgagaatcaaagagaatgagctgcgggctctagaagaggaattagcaggtcttaaaaacactgctgaaaagtatcgccaactaaaacagcagtgggagatgaaaactgaagaggcagatttattacaaaccaagctccagcaaagctcatatcacaagcaacaagaagaattagatgcccttaaaaaaaccattgaggaaagtgaggagactttgaaaaacactaaagaaatccaaagaaaagcagaagaaaaatatgaagtattggaaaataaaatgaaaaatgcagaagctgaaagagagcgagaactgaaagatgctcagaaaaaactggattgtgccaaaacaaaggcagatgcatctagcaagaagatgaaagaaaaacaacaggaagttgaagctatcactctggaactggaagagctcaagagagagcatacatcttacaaacaacagcttgaagctgtaaatgaagctatcaaatcctatgaaagtcagattgaagtaatggcagctgaggtggctaaaaataaggagtcagtaaataaagctcaagaagaggtgaccaagcaaaaagaggtgataacagcccaagacactgtaattaagctaaatatgcagaagtggcaaaacacaaggagcaaaacaatgattctcagccttaaaattaaggaattagaccaccacatcagcaaacataaacgggaggctgaagatggtgctgcaaaggtatccaaaatgttgaaagattatgactggattaatgcagagagacacctctttggccaacccaatagtgcctatgatttcaaaactaacaaccctaaagaagctggtcagagacttcagaagttgcaagaaatgaaggagaaactaggaagaaatgtcaatatgagagctatgaatgtattgacagaagctgaagagcgatgcaatgacttgatgaagaagaagagaattgtagaaaatgacaaatccaaaattcttacaactatagaagaccttgaccagaagaaaaaccaagccctaaatattgcatggcaaaaggtgaacaaggactttgggtctattttttctactcttttgcctggtgctaatgctatgcttgcaccaccagagggtcaaactgttttggatggtctggagttcaaggttgccttaggaaatacctggaaagaaaacctaactgaacttagtggtggtcagaggtctttagtggccttgtcattaatactgtccatgcttctcttcaaacctgctccaatttatatccttgatgaggtagatgcagccttggatctttctcatacccaaaacattggacagatgctgcgtactcatttcacacattctcagttcattgtggtgtcactaaaagaaggtatgttcaacaatgcaaacgttcttttcaaaaccaagtttgtggatggtgtttctacagtagccagatttactcaatgtcaaaatggaaagatttcaaaggaagcaaaatccaaggcaaaaccacccaaaggagcacatgtggaagtttaaactacaaagttatttcttcatcttgacctgtttttttaaatgtaaacttttaaggacttgagataactaatttgtttatatacaaaaattaatgttactgtgttacttaacccatgttttctctttatataatcacttatcgcttacaaatgagcatatattcctcatctcttaactagtctaattatggtccaattattgtggttgtgattttatgcatatccatcaaaatgttttttttcttatgcgggtcttttatatattagggatcctgagatacccgattctatatgtaaaagctaatatacaaaaaagcagattaaattacatgataaatgtagctgaaaaaaaaaaaaaa

SEQ ID NO: 375 - protein, 1197 aa, Homo sapien
MHIKSIILEGFKSYAQRTEVNGFDPLFNAITGLNGSGKSNILDSICFLLGISNLSQVRASNLQDLVYKNGQAGITKASVSITFDNSDKKQSPLGFEVHDEITVTRQVVIGGRNKYLINGVNANNTRVQDLFCSVGLNVNNPHFLIMQGRITKVLNMKPPEILSMIEEAAGTRMYEYKKIAAQKTIEKKEAKLKEIKTILEEEITPTIQKLKEERSSYLEYQKVMREIEHLSRLYIAYQFLLAEDTKVRSAEELKEMQDKVIKLQEELSENDKKIKALNHEIEELEKRKDKETGVILRSLEDALAEAQRVNTKSQSAFDLKKKNLACEESKRKELEKNMVEDSKTLAAKEKEVKKITDGLHALQEASNKDAEALAAAQQHFNAVSAGLSSNEDGAEATLAGQMMACKNDISKAQTEAKQAQMKLKHAQQELKNKQAEVKKMDSGYRKDQEALEAVKRLKEKLEAEMKKLNYEENKEESLLEKRRQLSRDIGRLKETYEALLARFPNLRFAYKDPEKNWNRNCVKGLVASLISVKDTSATTALELVAGERLYNVVVDTEVTGKKLLERGELKRRYTIIPLNKISARCIAPETLRVAQNLVGPDNVHVALSLVEYKPELQKAMEFVFGTTFVCDNMDNAKKVAFDKRIMTRTVTLGGDVFDPHGTLSGGARSQAASILTKFQELKDVQDELRIKENELRALEEELAGLKNTAEKYRQLKQQWEMKTEEADLLQTKLQQSSYHKQQEELDALKKTIEESEETLKNTKEIQRKAEEKYEVLENKMKNAEAERERELKDAQKKLDCAKTKADASSKKMKEKQQEVEAITLELEELKREHTSYKQQLEAVNEAIKSYESQIEVMAAEVAKNKESVNKAQEEVTKQKEVITAQDTVIKLNMQKWQNTRSKTMILSLKIKELDHHISKHKREAEDGAAKVSKMLKDYDWINAERHLFGQPNSAYDFKTNNPKEAGQRLQKLQEMKEKLGRNVNMRAMNVLTEAEERCNDLMKKKRIVENDKSKILTTIEDLDQKKNQALNIAWQKVNKDFGSIFSTLLPGANAMLAPPEGQTVLDGLEFKVALGNTWKENLTELSGGQRSLVALSLILSMLLFKPAPIYILDEVDAALDLSHTQNIGQMLRTHFTHSQFIVVSLKEGMFNNANVLFKTKFVDGVSTVARFTQCQNGKISKEAKSKAKPPKGAHVEV

SEQ ID NO: 376 - DNA, 3045 bp, Homo sapien
actaagaccgcaaggcattcatttcctcctacggtggatgcggacgccgggaggaggagagccccagagagaggagctgggagcggaggcgcaggcaatgctcagccctggatgtagctgagaggctgggagaagagacgaccgctggagaccgagcggcgtggggaagacctaggggggtgggtgggggaagcagacaggagaacactcgaaatcaagcgctttacagattattttattttgtatagagaacacgtagcgactccgaagatcagccccaatgaacatgtcagtgttgactttacaagaatatgaattcgaaaagcagttcaacgagaatgaagccatccaatggatgcaggaaaactggaagaaatctttcctgttttctgctctgtatgctgcctttatattcggtggtcggcacctaatgaataaacgagcaaagtttgaactgaggaagccattagtgctctggtctctgacccttgcagtcttcagtatattcggtgctcttcgaactggtgcttatatggtgtacattttgatgaccaaaggcctgaagcagtcagtttgtgaccagggtttttacaatggacctgtcagcaaattctgggcttatgcatttgtgctaagcaaagcacccgaactaggagatacaatattcattattctgaggaagcagaagctgatcttcctgcactggtatcaccacatcactgtgctcctgtactcttggtactcctacaaagacatggttgccgggggaggttggttcatgactatgaactatggcgtgcacgccgtgatgtactcttactatgccttgcgggcggcaggtttccgagtctcccggaagtttgccatgttcatcaccttgtcccagatcactcagatgctgatgggctgtgtggttaactacctggtcttctgctggatgcagcatgaccagtgtcactctcactttcagaacatcttctggtcctcactcatgtacctcagctaccttgtgctcttctgccatttcttctttgaggcctacatcggcaaaatgaggaaaacaacgaaagctgaatagtgttggaactgaggaggaagccatagctcagggtcatcaagaaaaataatagacaaaagaaaatggcacaaggaatcacacgtggtgcagctaaaacaaaacaaaacatgagcaaacacaaaacccaaggcagcttagggataattaggttgatttaacccagtaagtttatgatccttttagggtgaggactcactgagtgcacctccatctccaagcactgctgctggaagaccccattccctctttatctatcaactctaggacaagggagaacaaaagcaagccagaagcagaggagactaatcaaaggcaaacaaaggctattaacacataggaaaatatgtatttactaagtgtcacatttctctaagatgaaagatttttactctagaaactgtgcgagcacaacacacacaatcctttctaactttatggacactaaactggagccaatagaaaagacaaaaatgaaagagacacagggtgtatatctagaacgataatgcttttgcagaaactaaagcctttttaagaaatgccagctgctgtagaccccatgagaaaagatgtcttaatcatccttatgaaaacagatgtaaacaactatatttcaactaacttcatcttcactgcatagcctcaggctagtgagtttgccaaaaccaaagggggtgaatacttccccaagattcttcctgggaggatggaaacagtgcagcccaggtcccatgggggcagctccatcccagagcatttctgatagttgaactgtaatttctactcttaagtgagatatgaagtattatccttttgttcagttgccccgggcttttgaacagaagagtaaatacagaattgaaaaagataaacactcaaccaaacaatgtgaaaacgggttctgtagtatttgtaaaaaggcccggcccaggaccactgtgagctggaaaagggagaaaggcagtgggaaaagaggtgagccgaagatcaattcgacagacagacggtgtgtatgcccctccctgtttgacttcacacacactcataactttccaaatgaaaccccacagtatagcgcatattttcgatatttttgtgaattccaaaaggaaatcacagggctgttcgaaatattgggggaacactgtgtttctgcatcatctgcatttgctccccaagcaatgtagaggtgtttaaagggccctctgctggctgagtggcaatactacaacaaacttcaaggcaagtttggctgaaaacagttgacaacaaagggcccccatacacttatccctcaaattttaagtgatatgaaatacttgtcatgtctttggccaaatcagaagatattcatcctgcttcaagtcagcttcagaaatgttttaaaagggactttagctctggaactcaaaatcaatttattaagagccatattctttaaaaaaaaaagctggataatattatctgtaatatttcagtcctttacaagccaaatacatgtgtcaatgtttctagtatttcaaagaagcaattatgtaaagttgttcaatgtgacataatagtattataattggttaagtagcttaatgattaggcaaactagatgaaaagattaggggcttccacactgcatagatcacacgcacatagccacgcatacacacacagacacacagatgtggggtacactgaatttcaaagcccaaatgaatagaaacacattttctggctagcagaaaaaaacaaaacaaaactgttgtttctctttcttgctttgagagtgtacagtaaaagggattttttcgaattatttttatattattttagctttaattgtgctgtcgttcatgaaacagagctgctctgcttttctgtcagagatggcaagggctttttcagcatctcgtttatgtgtggaatttaaaaagaataaagttttattccattctgaaaaaaaaaaaaaaaaa

SEQ ID NO: 377 - protein, 265 aa, Homo sapien
MNMSVLTLQEYEFEKQFNENEAIQWMQENWKKSFLFSALYAAFIFGGRHLMNKRAKFELRKPLVLWSLTLAVFSIFGALRTGAYMVYILMTKGLKQSVCDQGFYNGPVSKFWAYAFVLSKAPELGDTIFIILRKQKLIFLHWYHHITVLLYSWYSYKDMVAGGGWFMTMNYGVHAVMYSYYALRAAGFRVSRKFAMFITLSQITQMLMGCVVNYLVFCWMQHDQCHSHFQNIFWSSLMYLSYLVLFCHFFFEAYIGKMRKTTKAE

SEQ ID NO: 378 - DNA, 1885 bp, Homo sapien
cgggcactcaccgtgtgtagttggcatctccgcgcgtccggacacccgatcccagcatccctgcctgcaggactgttcgtgttcagctcgcgtcctgcagctgtccgaggtgctccagttggaggctgaggttcccgggctctgtcgctgagtgggcggcggcaccggcggagatgcctgggaagaaggcgcgcaagaacgctcaaccgagccccgcgcgggctccagcagagctggaagtcgagtgtgctactcaactcaggagatttggagacaaactgaacttccggcagaaacttctgaatctgatatccaaactcttctgctcaggaacctgactgcatcaaaaacttgcatgaggggactccttcaaaagagttttctcaggaggtgcacgtttcatcaatttgaagaaagactgcattgtaattgagaggaatgtgaaggtgcattcatgggtgcccttggaaacggaagatggaatacatcaaagtgaatttctgttcaagttttcccagattatcattctttgggatgagagaacattataaaaccactttgtttattttaaagcaagaatggaagacccttgaaaataaagaagtaattattgacacatttcttttttacttagagaatcgttctagtgtttttgccgaagattaccgctggcctactgtgaaggtagatgacctgtgattagactgggcggctggggagaaacagttcagtgcattgttgttgttgctgtttttggtgttttgcttttcagtgccaactcagcacattgtatatgattcggtttatacatattaccttgttataatgaaaaaactcattctgagaacactgaaatgttatactcagtgttgatttcttcggtcactacacaacgtaaaatcatttgtttcttttgactcaaattgtattgcttctgttcagatgatctttcattcaatgtgttcctgttgggcgttactagaaactatggaaaactggaaaataactttgaaaaaattggataaagtataggagggttacttggggccagtaaatcagtagactgaacattcaatataataaaagaacatggggattttgtataaccagggataataaaaagaaaaagaagttaatttttaattgatgtttttgaaacttagtagaacaaatattcagaagtaacttgataagatatgaatgtttctaaagagtttctaaaggttcgaaatgctccttgtcacattagtgtgcatcctacaaaaagtgatctcttaatgtaaattaagaatattttcataattggaatatacttttcttaaaaaaaaggaacagttagttctcatctagaatgaaagttccatatatgcattggtgaatatatatgtatacacatacttacatacttatatgggtatctgtatagataatttgtattagagtattatatagcttcttagtagggtctcaagtaagttcattttttttatctgggctatatacagtcctcaaataaataatgtcttgattttatttcagcaggaataattttatttattttgcctatttataattaaagtatttttctttagtttgaaatgtgtattaaagttacatttttgagttacaagagtcttataactacttgaatttttagttaaaatgtcttaatgtaggttgtagtcactttagatggaaaattacctcacatctgttttcttcagtattacttaagattgtttatttagtggtagagagattttttttttcagcctagaggcagctattttaccatctggtatttatggtctaatttgtatttaaacatatgcacacatataaaagttgatactgtggcagtaaactattaaaagttttcactgtt

SEQ ID NO: 379 - protein, 54 aa, Homo sapien
MPGKKARKNAQPSPARAPAELEVECATQLRRFGDKLNFRQKLLNLISKLFCSGT

SEQ ID NO: 380 - DNA, 1885 bp, Homo sapien; identical to SEQ ID NO: 378

SEQ ID NO: 381 - protein, 54 aa, Homo sapien; identical to SEQ ID NO: 379

SEQ ID NO: 382 - DNA, 2119 bp, Homo sapien
agcctgcccttggggctgcccacgcccccttcagatcctttgctccggagagagacctgtccgagcagaggcctggactacatctcccggcgtgcctggcagtgtggtggcctctgtgcgccgtctgcactcgttgcaggcgacgatgcagagggctgtaagtgtggtggcccgtctgggctttcgcctgcaggcattccccccggccttgtgtcgtccacttagttgcgcacaggaggtgctccgcaggacaccgctctatgacttccacctggcccacggcgggaaaatggtggcgtttgcgggttggagtctgccagtgcagtaccgggacagtcacactgactcgcacctgcacacacgccagcactgctcgctctttgacgtgtctcatatgctgcagaccaagatacttggtagtgacaggtgtaagctgatggagagtctagtggttggagacattgcagagctaagaccaaaccaggggacactgtcgctgtttaccaacgaggctggaggcatcttagatgacttgattgtaaccaatacttctgagggccacctgtatgtggtgtccaacgctggctgctgggagaaagatttggccctcatgcaggacaaggtcagggagcttcagaaccagggcagagatgtgggcctggaggtgttggataatgccctgctagctctgcaaggccccactgcagcccaggtactacaggccggcgtggcagatgacctgaggaaactgcccttcatgaccagtgctgtgatggaggtgtttggcgtgtctggctgccgcgtgacccgctgtggctacacaggagaggatggtgtggagatctcggtgccggtagcgggggcagttcacctggcaacagctattctgaaaaacccagaggtgaagctggcagggctggcagccagggacagcctgcgcctggaggcaggcctctgcctgtatgggaatgacattgatgaacacactacacctgtggagggcagcctcagttggacactggggaagcgccgccgagctgctatggacttccctggagccaaggtcattgttccccagctgaagggcagggtgcagcggaggcgtgtggggttgatgtgtgagggggcccccatgcgggcacacagtcccatcctgaacatggagggtaccaagattggtactgtgactagtggctgcccctccccctctctgaagaagaatgtggcgatgggttatgtgccctgcgagtacagtcgtccagggacaatgctgctggtagaggtgcggcggaagcagcagatggctgtagtcagcaagatgccctttgtgcccacaaactactataccctcaagtgaagctggctcagggtggggctgtcccttccaggagttttgcccctacaaggggttagtcaagaagctgaggcagaactcactgggggtgggcagttaaggtggaggctgattctaattgtctggttgaggggccacaccacctattccccccacctaactcatgccattccagcttccttcaggaccctgcttctgagtgacggaccagctcacacaatgtcttgtttcagtccatgatcccactgacctactcttgcctgctggagggtaatgagaagctttggttctgccatctctcccactctgccaggtgctggctgtggagcaaaggctcacctttgtggagaggataaaacctkcccaacctacctcaccatggtttttcacattgcaaagggtaataacatgggcagtgcggacttaggctaccccctccagtttgctttccgtaaatgcaaattgtccttactgcaagtcaggaatgattgctgactcacagtagggctgctatgcctgtgtgtaaacttggggatggctgagggaacatagactcactcttccacattcccaagttggtctagtgtgctgcccagtagcaaaccatggcagactcaccacctattctgagttccagggctgctgtagggcagggtgggcttcctcccagacttgccttaccctgggctgatctttgcccctggtatgcattaatggactccactgaatcctgaaaaaaaaattaaacttccttcttacttgcca

SEQ ID NO: 383 - protein, 403 aa, Homo sapien
MQRAVSVVARLGFRLQAFPPALCRPLSCAQEVLRRTPLYDFHLAHGGKMVAFAGWSLPVQYRDSHTDSHLHTRQHCSLFDVSHMLQTKILGSDRCKLMESLVVGDIAELRPNQGTLSLFTNEAGGILDDLIVTNTSEGHLYVVSNAGCWEKDLALMQDKVRELQNQGRDVGLEVLDNALLALQGPTAAQVLQAGVADDLRKLPFMTSAVMEVFGVSGCRVTRCGYTGEDGVEISVPVAGAVHLATAILKNPEVKLAGLAARDSLRLEAGLCLYGNDIDEHTTPVEGSLSWTLGKRRRAAMDFPGAKVIVPQLKGRVQRRRVGLMCEGAPMRAHSPILNMEGTKIGTVTSGCPSPSLKKNVAMGYVPCEYSRPGTMLLVEVRRKQQMAVVSKMPFVPTNYYTLK

SEQ ID NO: 384 - DNA, 2156 bp, Homo sapien
agcgcagcactccccgctcgttggcccgggtatcccagcgcggacccacgcgatacgctgacgccccgacgccgatccggccgagccaagtaagggggacggcccgagacggagaagggagagagtgggagtttcccagcccgcagaactttcgaagttgagaagagaacccctggaacgtgcgctcagcactgggattttctggactcaacgatgactctgaataatgtcaccatgcgccagggcactgtgggcatgcagccacagcagcagcgctggagcatcccagctgatggcaggcatctgatggtccagaaagagccccaccagtacagccaccgcaaccgccattctgctacccctgaggaccactgccgccgaagctggtcctctgactccacagactcagtcatctcctctgagtcagggaacacctactaccgagtggtgctcataggggagcagggggtgggcaagtccactctggccaacatctttgcaggtgtgcatgacagcatggacagcgactgcgaggtgctgggagaagatacatatgaacgaaccctgatggttgatggggaaagtgcaacgattatactcctggatatgtgggaaaataagggggaaaatgaatggctccatgaccactgcatgcaggtcggggacgcatacctgattgtctactcaatcacagaccgagcgagcttcgagaaggcatctgagctgcgaatccagctccgcagggcccggcagacagaggacattcccataattttggttggcaacaaaagtgacttagtgcggtgccgagaagtgtctgtatcagaagggagagcctgtgcagtggtgtttgactgcaagttcatcgagacctctgcagctgtccagcacaacgtgaaggagctgtttgagggcattgtgcgacaggtgcgccttcggcgggacagcaaggagaagaatgaacggcggctggcctaccagaaaaggaaggagagcatgcccaggaaagccaggcgcttctggggcaagatcgtggccaaaaacaacaagaatatggccttcaagctcaagtccaaatcctgccatgacctctctgtactctaggaacccagggtcacccagatgtccctttgatggcccttgttgaaggccattgggaccaataatctatattagattgaatacttaagttagatgtggtttcccccattgtagcagggagctagcgtattagccttgtgggcaacatgatgcatgggaaatgaaagatttttgtaaaaagtcagtatttatttccaggaaaagcctgaccttgctatttgaacacccaagactctttagaggatgtgtttggtgttcacatgtgtttcttctattttggatagtagggaagtaaagcttacaaagaatgcctagaacaagaacttttcatcattaaaaatttttcccagtgttctgatatgtgactttgaggccaatgagtcataaacaaatataagaaagctgtcaatgagtttcttcaaaggagggaaaactttctacgaatctaagatccatggagctagaattgtagaactaggctcatcagaatcgtgactattattgctccatcaaactgtgaaaagaaatgatgtggaccttgctggaaacaaaggcttagcaaacaatttttgttcaatgcccaccgagacatatagaattgggaactgatacatgtgtcccttataggctcaaaaattatatcttacaatttcttatttagggggaaattatttgaatcagattctatttagtcaaaccaccttttatgttttattatttttgaattcatggagccatcataaaaatatttttaaaatcagaattattgataccctgtagtgcaaaatgtcaatttttaatgtataatcagaagtctgaattttcataaaacatatagcataaaaacctccagtactttggttgacccttgtatgtcacagctctgctctatttattattattttgcaaaataaccattttaacatttgataaagcatatttatgaacatatttcttaataagaaaaatatccattttattaccattttctatctttttcaaaatatgcaagtttttacctatatgtcttataataaaagaaataaaatatttga

SEQ ID NO: 385 - protein, 296 aa, Homo sapien
MTLNNVTMRQGTVGMQPQQQRWSIPADGRHLMVQKEPHQYSHRNRHSATPEDHCRRSWSSDSTDSVISSESGNTYYRVVLIGEQGVGKSTLANIFAGVHDSMDSDCEVLGEDTYERTLMVDGESATIILLDMWENKGENEWLHDHCMQVGDAYLIVYSITDRASFEKASELRIQLRRARQTEDIPIILVGNKSDLVRCREVSVSEGRACAVVFDCKFIETSAAVQHNVKELFEGIVRQVRLRRDSKEKNERRLAYQKRKESMPRKARRFWGKIVAKNNKNMAFKLKSKSCHDLSVL

SEQ ID NO: 386 - DNA, 4220 bp, Homo sapien
acgttgcccgggatgcggacaggttccgccgcctccagcgccccatcctgagccgattatctgcaattatgaaatgaagtaactcaagatgagcaagttaaaagtgataccagaaaaaagccttaccaataattctaggatcgtaggactcctggctcaactggagaagatcaatgctgagccttcagaatcagacactgcccgatatgttacatcaaaaattcttcatctggctcagagtcaagaaaaaacaaggagagaaatgacagccaaaggttctacaggaatggaaattctgctgtcaacattagagaacacaaaagatcttcaaactacacttaatatcttaagcattcttgttgagctggtgtcagctggtggaggtcgaagagtgagtttcttagtcaccaaaggtggttcacaaatattgttgcagttacttatgaatgccagcaaagaatctcccccacatgaggacttaatggtacagattcattctattcttgcaaagattggaccaaaagataaaaaatttggagtaaaggctagaattaatggggctctgaatataaccctgaatttggtcaagcagaatttgcagaatcatcgcttggttctaccttgccttcagcttttacgagtatattctgccaactctgtgaattcagtatccttagggaaaaatggagttgtggaactgatgtttaaaatcattggaccatttagtaagaagaattccagtcttataaaggttgctttagacactcttgctgcattgctaaaatcaaaaacaaatgccaggagagctgtagacagaggatatgtccaagtgcttttaacaatttatgtagattggcaccgccatgataaccggcatagaaacatgctcattcggaaaggaattttacggagtttaaaaagtgttacaaacatcaagttgggaagaaaagcatttattgatgccaatgggatgaaaattctgtataatacttcgcaattgcctgttattcctgtgactggtcctgtggctcagctctacagcttacctcctgaagtggatgacgtagtagatgaaagtgatgacaacgatgatattgatgtagaagctgaaaacgaaactgagaatgaagatgacctagatcaaaattttaagaatgatgatattgaaacagatattaacaaactaaaaccccagcaagaaccgggacgaacaatagaagatctaaaaatgtatgaacaccttttccctgagcttgttgatgattttcaggactatgatttaatctccaaagaaccaaagccttttgtatttgagggaaaagtacgtggtcctattgttgttcctacggcaggcgagggaacatctgggaattctggcaatttaagaaaagttgtaatgaaggagaacatatcttctaaaggagatgaaggtgaaaagaagtctacctttatggatctagcaaaagaagatattaaagataatgatagaacattacaacagcagccaggtgatcaaaatagaactatttcatcagtccatggtttaaacaatgatattgtaaaggccttggaccgaattacattgcagaatattccttctcaaacagccccaggttttactgcagaaatgaagaaggactgcagtcttcctcttactgtccttacctgtgctaaagcatgtccacacatggctacttgtggaaatgttctgtttgagggaagaacagttcagctagggaagctttgctgcactggagttggaactgaagatgatgaagatactgagtcaaattcatcggtagaacaagcatcggttgaagtacctgatggaccaacactccatgacccagacctctatattgagattgtgaaaaatacgaagtctgtcccagaatattcagaggtggcttatcccgattattttggtcacattccgcctccattcaaagagcctattttagaaaggccttatggtgtacaaaggacaaaaattgctcaagatattgaaaggctaatacatcagagtgatatcatagatcgtgtggtatatgacttggataacccaaattacaccattccagaagagggagatattttgaaatttaactccaaatttgagtctgggaatctgcgcaaagtaattcaaattagaaaaaatgaatatgatcttattctgaactcagacataaacagcaatcattatcatcagtggttttactttgaagtcagtggaatgcgaccaggtgttgcttacaggtttaacatcattaactgtgaaaagtccaacagtcagtttaattatggtatgcaaccactcatgtattcggttcaggaagcattaaatgccagaccatggtggattcgtatggggactgacatttgttactataaaaatcatttctcaagaagttcagttgctgcaggtgggcaaaagggaaaatcctactatacaattacatttactgtcaattttccacataaagatgatgtttgctactttgcttatcactatccatatacgtattcaactttacagatgcatcttcaaaaattggaatcagcacacaatcctcagcaaatctattttcggaaagatgtgttatgtgaaaccctgtctggaaacagctgccccttggtgactataacagcaatgccagagtctaattattatgaacatatctgccatttcagaaatcgcccttacgttttcttgtctgctcgggtacatcctggagaaactaatgcaagttgggttatgaaaggaacgttggaatatctcatgagcaataaccccactgctcagagcttacgagaatcttatatttttaaaattgtccctatgttaaatccagatggtgtcatcaatggaaatcatcgctgttctttaagtggagaggatttgaataggcagtggcaaagtccaagtccggatttacatcctacaatttaccatgctaaggggctgttgcaatacttggctgcagtgaagcgtttacccttggtttattgtgattatcatggccattcccgaaagaagaatgtatttatgtatggttgcagcatcaaagagacagtgtggcataccaatgataatgcaacttcatgtgatgttgtggaggatacgggatacaggacattgcctaagatactgagccatatcgccccagcattttgcatgagcagctgtagcttcgtagtggaaaaatctaaagaatccacagcacgtgttgtagtttggagggaaataggagtacaaagaagttataccatggagagtactttatgtggctgtgatcagggaaaatacaagggtttacagattggtacccgagaactggaagagatgggagcaaaattttgtgttggtcttttacgtttgaaaagactgacctctccattggagtataatctgccttccagcctgcttgactttgaaaatgatttaattgaatcaagctgcaaagtaactagccctaccacttatgtcttggatgaagatgaacctcgattccttgaagaagttgattacagtgcagaaagtaatgatgagttagatattgagttggctgaaaatgtaggagattatgaaccttctgctcaagaagaagtactttctgactctgaattatcaagaacatacctaccttgagcccgctgccatctcttgttaactgcaaagaataaatgaaatatcttggtttttatttcccaggaagcttgagagaaatgagtttatacagagctgactcaaaaagacaaaaagtaacttgggccagtttggtttcaagataataaatgtgttattaattaatgataaaattggcgcttgttttattttcgatattcaatgcactttatgtagcattgaatgatcaaatattggatttacctttaaaaaaaaaaaacctgagtatcattgcatgaatttttatctccctatggttatatcctgcatcaagtggataattttgaagtgtgttcagaatataaaattgaaattttagagttgttgaaaatcctgacttgttgaaaactaatatatatgtacatggatttctatagatgtgtttgtttagaagtgggtagatattgcagataagactgttcttcagaatcatgttaactattgggttgtgactgaagtagtgcagggtttgccttgaaaccattacattctacatttaccaaattaaacaaataaaaactgtattaaatgttgc

SEQ ID NO: 387 - protein, 1186 aa, Homo sapien
MSKLKVIPEKSLTNNSRIVGLLAQLEKINAEPSESDTARYVTSKILHLAQSQEKTRREMTAKGSTGMEILLSTLENTKDLQTTLNILSILVELVSAGGGRRVSFLVTKGGSQILLQLLMNASKESPPHEDLMVQIHSILAKIGPKDKKFGVKARINGALNITLNLVKQNLQNHRLVLPCLQLLRVYSANSVNSVSLGKNGVVELMFKIIGPFSKKNSSLIKVALDTLAALLKSKTNARRAVDRGYVQVLLTIYVDWHRHDNRHRNMLIRKGILRSLKSVTNIKLGRKAFIDANGMKILYNTSQLPVIPVTGPVAQLYSLPPEVDDVVDESDDNDDIDVEAENETENEDDLDQNFKNDDIETDINKLKPQQEPGRTIEDLKMYEHLFPELVDDFQDYDLISKEPKPFVFEGKVRGPIVVPTAGEGTSGNSGNLRKVVMKENISSKGDEGEKKSTFMDLAKEDIKDNDRTLQQQPGDQNRTISSVHGLNNDIVKALDRITLQNIPSQTAPGFTAEMKKDCSLPLTVLTCAKACPHMATCGNVLFEGRTVQLGKLCCTGVGTEDDEDTESNSSVEQASVEVPDGPTLHDPDLYIEIVKNTKSVPEYSEVAYPDYFGHIPPPFKEPILERPYGVQRTKIAQDIERLIHQSDIIDRVVYDLDNPNYTIPEEGDILKFNSKFESGNLRKVIQIRKNEYDLILNSDINSNHYHQWFYFEVSGMRPGVAYRFNIINCEKSNSQFNYGMQPLMYSVQEALNARPWWIRMGTDICYYKNHFSRSSVAAGGQKGKSYYTITFTVNFPHKDDVCYFAYHYPYTYSTLQMHLQKLESAHNPQQIYFRKDVLCETLSGNSCPLVTITAMPESNYYEHICHFRNRPYVFLSARVHPGETNASWVMKGTLEYLMSNNPTAQSLRESYIFKIVPMLNPDGVINGNHRCSLSGEDLNRQWQSPSPDLHPTIYHAKGLLQYLAAVKRLPLVYCDYHGHSRKKNVFMYGCSIKETVWHTNDNATSCDVVEDTGYRTLPKILSHIAPAFCMSSCSFVVEKSKESTARVVVWREIGVQRSYTMESTLCGCDQGKYKGLQIGTRELEEMGAKFCVGLLRLKRLTSPLEYNLPSSLLDFENDLIESSCKVTSPTTYVLDEDEPRFLEEVDYSAESNDELDIELAENVGDYEPSAQEEVLSDSELSRTYLP

SEQ ID NO: 388 - DNA, 2352 bp, Homo sapien
ggcggacgctggaaagcgccgttcctgactctaatgtacttagacacttgaagccacaaaaggatttatccccgaggttcctcatctgctcgcgaggatgccttttctcttctgccttgcgaaataacagcagcctagctgttgcccgtgaccagtgagaaaggcagcgtcgcgggctgattaggtttcacccaaagggtgccggcgccgaattggtttctaacgagaacttttaaaatgatccgttccaaaaaagggtaggagccgcgagaccctccaactgcccagagaaaacaagtctcgtctggcaaagttctcggcccacgcggtccgcggccaagggccaacggtccctcgccccacgttgccgcagcactgcgcgtgcgcgagccgctgtcaaacgcgctgacggaggccgagaagaaaaaaaggcgggagccgtcaatcccgggttgagcaaaatggcgcgggagaaggagatgcaggagttcacccgtagcttcttccgaggccgcccggacctcagcacgcttacgcattccatcgtgcggcggaggtacttagctcactcgggccgcagccacctggagcccgaggagaagcaggcactgaagcggctggtggaggaggagctgctgaagatgcaggtggatgaagccgcttccagggaagacaaactggaccttaccaagaagggcaagaggcctcccaccccttgtagcgacccggagagaaaaaggttccgcttcaattcagagtcggagtccggctctgaagcctccagcccagactactttggacccccagcaaagaatggggtggcagcagaagtcagcccagccaaagaggagaatccaaggcgagcctcaaaggcagttgaggagagcagtgatgaggaacggcagagggacctgcccgcacagaggggagaggagagcagtgaggaggaggaaaaggggtacaaggggaagactaggaagaaacctgtggtaaagaagcaggcaccaggcaaggcctcagtcagtaggaagcaggccagggaagaaagtgaggagagcgaggcagaacccgttcagaggacagcaaagaaggtggagggaaataaaggaactaaaagcctgaaggaaagtgaacaggagagtgaagaggagatcctagcccagaagaaagagcagagagaggaggaagtggaggaggaagagaaagaagaggatgaggaaaagggggattggaaacccagaaccaggagcaatggccggagaaagtcagctagggaggagaggagctgtaagcagaaaagccaggcaaagaggctcttgggagactcagacagcgaggaagagcagaaagaggcagccagcagtggggatgacagtgggagagatagagaacccccagtgcagaggaagagtgaggacaggacccagcttaagggtgggaagaggttgagtggaagcagcgaggacgaggaagacagtgggaagggggaacccacagctaaaggctctagaaagatggccagactgggcagcaccagtggtgaggaaagtgacttggagagggaggtaagtgacagcgaggcagggggaggcccccagggggagaggaagaaccgctcttccaagaagagctccaggaaaggcaggacacgaagctcctcttcctcctcagatggaagtccagaggccaaaggagggaaggctggctcaggtcgccgtggagaggaccacccggctgtgatgaggctgaagcgctacattcgggcctgtggtgcccatcgaaactacaagaagctgttgggctcctgttgctcacacaaggagcgcctgagtatcctccgggcagaactggaagcgctaggcatgaagggtaccccttccctagggaagtgtcgggccctgaaggagcagagggaggaggcagctgaggtggcctccttggatgttgcgaacatcatcagtggctcgggccggccacgcagacgtacagcctggaaccctttaggagaagcagcacccccaggggagctgtaccgacggaccctggactcagatgaagagcggccccgtcccgcacccccagactggtcacatatgcgtggcatcatcagcagtgatggcgagagtaactgagctctgccacccccaggagggacccttgatacatgtacaaagcatacatagcaccccttgccctgtgtctgtggaacagaagcagcttccttcagagaagactgcagctcccaaggacacaagctgttgggatgctacttctcagcttcacgctgtccctttaaggtgtttattttttaagactcaataaaggagtgtttttaatcacctcaaaaaaaaa

SEQ ID NO: 389 - protein, 556 aa, Homo sapien
MAREKEMQEFTRSFFRGRPDLSTLTHSIVRRRYLAHSGRSHLEPEEKQALKRLVEEELLKMQVDEAASREDKLDLTKKGKRPPTPCSDPERKRFRFNSESESGSEASSPDYFGPPAKNGVAAEVSPAKEENPRRASKAVEESSDEERQRDLPAQRGEESSEEEEKGYKGKTRKKPVVKKQAPGKASVSRKQAREESEESEAEPVQRTAKKVEGNKGTKSLKESEQESEEEILAQKKEQREEEVEEEEKEEDEEKGDWKPRTRSNGRRKSAREERSCKQKSQAKRLLGDSDSEEEQKEAASSGDDSGRDREPPVQRKSEDRTQLKGGKRLSGSSEDEEDSGKGEPTAKGSRKMARLGSTSGEESDLEREVSDSEAGGGPQGERKNRSSKKSSRKGRTRSSSSSSDGSPEAKGGKAGSGRRGEDHPAVMRLKRYIRACGAHRNYKKLLGSCCSHKERLSILRAELEALGMKGTPSLGKCRALKEQREEAAEVASLDVANIISGSGRPRRRTAWNPLGEAAPPGELYRRTLDSDEERPRPAPPDWSHMRGIISSDGESN

SEQ ID NO: 390 - DNA, 2324 bp, Homo sapien
ctccctttgggcaaggacctgagacccttgtgctaagtcaagaggctcaatgggctgcagaagaactagagaaggaccaagcaaagccatgatatttccatggaaatgtcagagcacccagagggacttatggaacatcttcaagttgtgggggtggacaatgctctgttgtgatttcctggcacatcatggaaccgactgctggacttaccattattctgaaaaacccatgaactggcaaagggctagaagattctgccgagacaattacacagatttagttgccatacaaaacaaggcggaaattgagtatctggagaagactctgcctttcagtcgttcttactactggataggaatccggaagataggaggaatatggacgtgggtgggaaccaacaaatctcttactgaagaagcagagaactggggagatggtgagcccaacaacaagaagaacaaggaggactgcgtggagatctatatcaagagaaacaaagatgcaggcaaatggaacgatgacgcctgccacaaactaaaggcagccctctgttacacagcttcttgccagccctggtcatgcagtggccatggagaatgtgtagaaatcatcaataattacacctgcaactgtgatgtggggtactatgggccccagtgtcagtttgtgattcagtgtgagcctttggaggccccagagctgggtaccatggactgtactcaccctttgggaaacttcagcttcagctcacagtgtgccttcagctgctctgaaggaacaaacttaactgggattgaagaaaccacctgtggaccatttggaaactggtcatctccagaaccaacctgtcaagtgattcagtgtgagcctctatcagcaccagatttggggatcatgaactgtagccatcccctggccagcttcagctttacctctgcatgtaccttcatctgctcagaaggaactgagttaattgggaagaagaaaaccatttgtgaatcatctggaatctggtcaaatcctagtccaatatgtcaaaaattggacaaaagtttctcaatgattaaggagggtgattataaccccctcttcattccagtggcagtcatggttactgcattctctgggttggcatttatcatttggctggcaaggagattaaaaaaaggcaagaaatccaagagaagtatgaatgacccatattaaatcgcccttggtgaaagaaaattcttggaatactaaaaatcatgagatcctttaaatccttccatgaaacgttttgtgtggtggcacctcctacgtcaaacatgaagtgtgtttccttcagtgcatctgggaagatttctacctgaccaacagttccttcagcttccatttcgcccctcatttatccctcaacccccagcccacaggtgtttatacagctcagctttttgtcttttctgaggagaaacaaataagaccataaagggaaaggattcatgtggaatataaagatggctgactttgctctttcttgactcttgttttcagtttcaattcagtgctgtacttgatgacagacacttctaaatgaagtgcaaatttgatacatatgtgaatatggactcagttttcttgcagatcaaatttcacgtcgtcttctgtatactgtggaggtacactcttatagaaagttcaaaaagtctacgctctcctttctttctaactccagtgaagtaatggggtcctgctcaagttgaaagagtcctatttgcactgtagcctcgccgtctgtgaattggaccatcctatttaactggcttcagcctccccaccttcttcagccacctctctttttcagttggctgacttccacacctagcatctcatgagtgccaagcaaaaggagagaagagagaaatagcctgcgctgttttttagtttgggggttttgctgtttccttttatgagacccattcctatttcttatagtcaatgtttcttttatcacgatattattagtaagaaaacatcactgaaatgctagctgcaagtgacatctctttgatgtcatatggaagagttaaaacaggtggagaaattccttgattcacaatgaaatgctctcctttcccctgcccccagaccttttatccacttacctagattctacatattctttaaatttcatctcaggcctccctcaaccccaccacttcttttataactagtcctttactaatccaacccatgatgagctcctcttcctggcttcttactgaaaggttaccctgtaacatgcaattttgcatttgaataaagcctgctttttaagtgttaa

SEQ ID NO: 391 - protein, 372 aa, Homo sapien [sequence omitted]

SEQ ID NO: 392 - DNA, 3831 bp, Homo sapien
aactcatgcggccagagcgggaaagagactcgtctttgcgtccgagttctggagccgccgcaccccgactcctggggccgcggcagcggctgcgaggggacgggcgtccgctgtctcctgggttcccctcgtagcgacccgcgggatcggaaaaaaaggagaagatggaggaggagggtggcagcagcggcggcgccgcggggaccagcgcggacggcggcgacggaggagagcagctcctcactgtcaagcacgagctgcggactgctaatttgacaggacatgctgagaaggtgggaatagaaaattttgagctcctgaaggtcctaggaactggagcttatggaaaagtatttctagttcgtaaaataagtggccatgatactggaaagctgtatgccatgaaagttttgaaaaaggcaacaatcgttcaaaaggccaaaaccacagagcatacaaggacagaacgacaagtcctggaacacattaggcagtcgccatttttggtaacattacattatgctttccagacagaaaccaaacttcatctcattttagattatataaatggtggtgaactttttactcatctttctcaaagagagcgtttcacagagcatgaggtgcagatttatgttggagagattgtgcttgccctcgaacatctccacaagttggggattatatatcgtgatattaagcttgagaatattctacttgattctaatggccatgtggtgctgacagattttggtctgagtaaggagtttgtggctgatgaaactgaaagagcatattccttttgtggaactattgaatacatggcaccagatattgtcagagggggagattcaggacatgacaaggcagttgactggtggagtttgggtgttctaatgtatgaattactaactggagcatctcctttcactgttgatggagaaaaaaattcccaagctgagatatctaggagaatattaaaaagtgagcctccatatccccaagaaatgagtgctttagcgaaagacctaattcagcgtcttttgatgaaagatcccaagaagagattgggatgtggtccacgtgatgcagatgaaatcaaagaacatctcttctttcagaaaataaattgggatgatttagccgccaaaaaagtgcctgcaccatttaagccagtcattcgagatgaattagatgtgagtaactttgcagaagagttcacagaaatggatcccacttattctcccgcagccctgccccagagttctgagaagctgtttcagggctattcctttgttgctccttccatcctattcaagcgtaatgcagctgtcatagaccctcttcagtttcacatgggagttgaacgtcctggagtgacaaatgttgccaggagtgcaatgatgaaggactctccattctatcaacactatgacctagatttgaaggacaaacccctgggagaaggtagtttttcaatttgtcgaaagtgtgtgcataaaaaaagtaaccaagctttgcaagtcaaaataatcagcaaaaggatggaagccaatactcaaaaggaaataacagctctgaaactctgtgaaggacaccccaatattgtgaagttgcatgaagtttttcatgatcagcttcacacgtttctagtgatggaacttctgaatggaggagaactgtttgacgcattaagaaaaaagaagcacttcagtgagacggaagccagctacatcatgaggaagcttgtttcagctctaagccacatgcatgatcttggagtggtgcacagggatctgaaacctgagaatttattgttcaccgatgaaaatgacaatttggaaattaaaataattgattttggatttgcacggctaaagccaccggataatcagcccctgaagactccatgcttcacccttcattcatgccgcccagagctcttgaatcagaacggctacgatgagtcctgtgacctgtggagcttgggcgtcattttgtacacaatgttgtcaggacaggttcccttccaatctcatgaccgaagtttgacgtgtaccagcgcggtggaaatcatgaagaaaattaaaaagggagatttctcctttgaaggagaagcctggaagaatgtatcccaagaggctaaagatttgatccaaggacttctcacagtagatccaaacaaaaggcttaaaatgtctggcttgaggtacaatgaatggctacaagatggaagtcagctgtcctccaatcctctgatgactccggatattctaggatcttccggagctgccgtgcatacctgtgtgaaagcaaccttccacgcctttaacaaatacaagagagaggggttttgccttcagaatgttgataaggcccctttggctaagagaagaaaaatgaaaaagactagcaccagtaccgagacgcgcagagggtccagtgagagttcccattcttcttcctctcattctcacggtaaaactacacccaccaagacactgcagcccagcaatcctgccgacagcaataacccggagaccctcttccagttctcggactcagagcttaggcatggtaggagtgatcagtgatccattgcacctttattccctcagcatatgcctgagtcgatcttttatgcttttaaaaatgtttcccgttggtctcattggaatctgcctcctaatgatttttttcaggaaaacctgtttggttatcctcattcaaaagcactggacagagaatgttactgtgaatagagcacatattactctttttacgaacctagcatgatgccaacaagactattcttgaaagagcaaaggttcctgtaaatttaattagggctagatttgagctgcttgtaagtcacaggttttccagatgtctgccaacaagaaatgactcatactgtgatgataccttttgctttgccttgtggacaatgtgggtttttgaaatttgcacccttcaaacaatgatttatcagagaaaggggtctgttttcaaaaaagattctgtaatgaattttatgtgtggcatatacttatttcttgagagaagattttaacttattgtttttattttatggttacatatgatgataacctgctattattaaactttttctaaaaagtgaaaaaaaataaaaaagatataagaactcaaggtcccatactctgtattcgggatccatctgagatgcatgctaagctatgtgtatgtttttaattttgcactgctctttcctggcaatttgttttaatggttattgcagaatattaaggtacatgtctctctgttttaagtaatattgcactttataaaaaagtatgaataaagcaaactattttataaagtgcactgtttaaagcatttgcactgtatttttgccatttattttcattttctactttaaatttgtcctcacatgcctcttctactttgtatgcaacaagtagaatggggccttgttgtgtcatgtagtcagccacttatgcaccaatgtgaggaaaacctaaagggaaattaaactaaacactgtgcttcatatttgtacactgtgttgtactacagtgaggaatttcctcctgtagtcatatattatgtacataatattttagaatcatacctatgacttgtttggaaatttttctgttgaattttaaatccagaaagcatattttataaacttatgcagagcacttttattgctcaaaagttctgaattcatacagaaaacaagtactatgtgatgaaaacatttcattgaaagattgcggcatttaaaaatacaattaattcgttccctatgcaaaaaaaaaaaaa

SEQ ID NO: 393 - protein, 809 aa, Homo sapien
MEEEGGSSGGAAGTSADGGDGGEQLLTVKHELRTANLTGHAEKVGIENFELLKVLGTGAYGKVFLVRKISGHDTGKLYAMKVLKKATIVQKAKTTEHTRTERQVLEHIRQSPFLVTLHYAFQTETKLHLILDYINGGELFTHLSQRERFTEHEVQIYVGEIVLALEHLHKLGIIYRDIKLENILLDSNGHVVLTDFGLSKEFVADETERAYSFCGTIEYMAPDIVRGGDSGHDKAVDWWSLGVLMYELLTGASPFTVDGEKNSQAEISRRILKSEPPYPQEMSALAKDLIQRLLMKDPKKRLGCGPRDADEIKEHLFFQKINWDDLAAKKVPAPFKPVIRDELDVSNFAEEFTEMDPTYSPAALPQSSEKLFQGYSFVAPSILFKRNAAVIDPLQFHMGVERPGVTNVARSAMMKDSPFYQHYDLDLKDKPLGEGSFSICRKCVHKKSNQALQVKIISKRMEANTQKEITALKLCEGHPNIVKLHEVFHDQLHTFLVMELLNGGELFDALRKKKHFSETEASYIMRKLVSALSHMHDLGVVHRDLKPENLLFTDENDNLEIKIIDFGFARLKPPDNQPLKTPCFTLHSCRPELLNQNGYDESCDLWSLGVILYTMLSGQVPFQSHDRSLTCTSAVEIMKKIKKGDFSFEGEAWKNVSQEAKDLIQGLLTVDPNKRLKMSGLRYNEWLQDGSQLSSNPLMTPDILGSSGAAVHTCVKATFHAFNKYKREGFCLQNVDKAPLAKRRKMKKTSTSTETRRGSSESSHSSSSHSHGKTTPTKTLQPSNPADSNNPETLFQFSDSELRHGRSDQ

SEQ ID NO: 394 - DNA, 2417 bp, Homo sapien; identical to SEQ ID NO: 7

SEQ ID NO: 395 - protein, 555 aa, Homo sapien
LESTPFSGVANQIHTLCERPTYGEVKDGALDVKRQHKCPGPTSGPSPGTNLSGCIRMNDDPSMEENGVERVCPESLLQSRGYSSLPLPRHTSSTDGTITSSDPGLEILNMASCDLDRNSLCKKEEDTRSASPTIEAQGTSPAHDNIAFQDSTSKDKTILNLEAKEEPETIEEHKKEHASGDSVVSPLPVTTVKSVNVRQSENTSANEKEVEAEFLRLSLGFKCDWFTLEKRVKLEERSRDWAEENLKKEITNSLKLLESLTPLCEDDNQAQEIIKKLEKSIKFLSQCAARVASRAEMLGAINQESRVSKAVEVMIQHVENLKRMYAKEHAELEELKQVLLQNERSFNPLEDDDDCQIKKRSASLNSKPSSLRRVTIASLPRNIGNAGMVAGMENNDRFSRRSSSWRILGSKQSEHRPSLPRFISTYSWADAEEEKCELKTKDDSEPSGEETVERTRKPSLSEKKNNPSKWDVSSVYDTIASWATNLKSSIRKANKALWLSIAFIVLFAALMSFLTGQLFQKSVDAAPTQQEDSWTSLEHILWPFTRLRHNGPPPV

SEQ ID NO: 396 - DNA, 3793 bp, Homo sapien
  Unsure 2588-2608: Unknown base
cgaaaggccggccttggctgcgacagcctgggtaagaggtgtaggtcggcttggttttctgctacccggagctgggcaagcgggtgggagaacagcgaagacagcgtgagcctgggccgttgcctcgaggctctcgcccggcttctcttgccgacccgccacgtttgtttggatttaatcttcaggttgccggcgcccgcccgcccgctggcctcgcggtgtgagagggaagcacccgtgcctgtggctggtggctggcgcctggagggtccgcacacccgcccggccgcgccgctttgcccgcggcagccgcgtccctgaaccgcggagtcgtgtttgtgtttgacccgcgggcgccggtggcgcgcggccgaggccggtgtcggcggggcggggcggtcgcggcggaggcagaggaagagggagcgggagctctgcgaggccgggcgccgccatggaactgggcccgagccccgcaccgcgccgcctgctcttcgcctgcagcccccctcccgcgtcgcagcccgtcgtgaaggcgctatttggcgcttcagccgccgggggactgtcgcctgtcaccaacctgaccgtcactatggaccagctgcagggtctgggcagtgattatgagcaaccactggaggtgaagaacaacagtaatctgcagagaatgggctcctccgagtcaacagattcaggtttctgtctagattctcctgggccattggacagtaaagaaaaccttgaaaatcctatgagaagaatacattccctacctcaaaagctgttgggatgtagtccagctctgaagaggagccattctgattctcttgaccatgacatctttcagctcatcgacccagatgagaacaaggaaaatgaagcctttgagtttaagaagccagtaagacctgtatctcgtggctgcctgcactctcatggactccaggagggtaaagatctcttcacacagaggcagaactctgcccagctcggaatgctttcctcaaatgaaagagatagcagtgaaccagggaatttcattcctctttttacaccccagtcacctgtgacagccactttgtctgatgaggatgatggcttcgtggaccttctcgatggagagaatctgaagaatgaggaggagaccccctcgtgcatggcaagcctctggacagctcctctcgtcatgagaactacaaaccttgacaaccgatgcaagctgtttgactccccttccctgtgtagctccagcactcggtcagtgttgaagagaccagaacgatctcaagaggagtctccacctggaagtacaaagaggaggaagagcatgtctggggccagccccaaagagtcaactaatccagagaaggcccatgagactcttcatcagtctttatccctggcatcttcccccaaaggaaccattgagaacattttggacaatgacccaagggaccttataggagacttctccaagggttatctctttcatacagttgctgggaaacatcaggatttaaaatacatctctccagaaattatggcatctgttttgaatggcaagtttgccaacctcattaaagagtttgttatcatcgactgtcgatacccatatgaatacgagggaggccacatcaagggtgcagtgaacttgcacatggaagaagaggttgaagacttcttattgaagaagcccattgtacctactgatggcaagcgtgtcattgttgtgtttcactgcgagttttcttctgagagaggtccccgcatgtgccggtatgtgagagagagagatcgcctgggtaatgaataccccaaactccactaccctgagctgtatgtcctgaaggggggatacaaggagttctttatgaaatgccagtcttactgtgagccccctagctaccggcccatgcaccacgaggactttaaagaagacctgaagaagttccgcaccaagagccggacctgggcaggggagaagagcaagagggagatgtacagtcgtctgaagaagctctgagggcggcaggaccagccagcagcagcccaagcttccctccatccccctttaccctctttgctgcagagaaacttaagcaaaggggacagctgtgtgacatttggagagggggcctgggacttccatgccttaaacctacctcccacactcccaaggttggagcccagggcatcttgctggctacgcctcttctgtccctgttagacgtcctccgtccatatcagaactgtgccacaatgcagttctgagcaccgtgtcaagctgctctgagccacagtgggatgaaccagccggggccttatcgggctccagccatctcatgaggggagaggagacggaggggagtagagaagttacacagaaatgctgctggccaaatagcaaagacaacctgggaaggaaaggtctttgtgggataatccatatgtttaatttattcaacttcatcaatcactttattttatttttttttctaactcctggagacttattttactgcttcattaggttgaaatactgccattctaggtagggttttattatcccagggactacctcggcnnnnnnnnnnnnnnnnnnnnngaagtgggtaagaaaatgcaaacctgttataagttatcggacagaaagctaggtgctctgtcacccccaggaggcgctgtggtactggggctgctgctatttaagccaagaactgaggtcctggtgagagcgttggacccaggcttggctgcctgacataagctaaatctcccagacccaccactggctaccgatatctatttggtgggaggtgtggccctgttcttcctcaccccagttccatgacattggctggtataggagccacagtcaggaaagcacttgaggcagcatctgttgggccacccccggctcagtgctggaatgttgcagtgtaggtttcccaggcaaggggggtgggggtaggtgggctccacaggatgggggaggagcatgtccactgagtatcttccttatgttgctgtgatattgatagcttttattttctaatttttaaaaaatggtcatattatgagtcaaagagtatcaaatcagtgttggatggaccacccaagggtgaggagaggggctggaagccctgggcattaggagaagggagtgggtgctggcatggacatgactggatagaattttctcaggagggagcttggtggattttgaaggtaaaactttctgggtttatcatgttttaattttagagacagggagtgatgaatcatcaccggttgtccccttatctaactccataaaagtgggaatttcaaaagaacacctcatccaaggagctggggcagacttcattgattctagagagacctgtttcagtgcctactcatccctgccctctggtgccagcctccttaccatcacggcttcactgaggtgtaggtgggtttttcttaaacaggagacagtctctcccctcttacctcaacttcttggggtgggaatcagtgatactggagatggctagttgctgtgttacgggtttgagttacatttggctataaaacaatcttgttgggaaaaatgtgggggagaggacttcttcctacacgcgcattgagacagattccaactggttaatgatattgtttgtaagaaagagattctgttggttgactgcctaaagagaaaggtgggatggccttcagattataccagcttagctagcattactaaccaactgttggaagctctgaaaataaaagatcttgaacccat

SEQ ID NO: 397 - protein, 523 aa, Homo sapien
MELGPSPAPRRLLFACSPPPASQPVVKALFGASAAGGLSPVTNLTVTMDQLQGLGSDYEQPLEVKNNSNLQRMGSSESTDSGFCLDSPGPLDSKENLENPMRRIHSLPQKLLGCSPALKRSHSDSLDHDIFQLIDPDENKENEAFEFKKPVRPVSRGCLHSHGLQEGKDLFTQRQNSAQLGMLSSNERDSSEPGNFIPLFTPQSPVTATLSDEDDGFVDLLDGENLKNEEETPSCMASLWTAPLVMRTTNLDNRCKLFDSPSLCSSSTRSVLKRPERSQEESPPGSTKRRKSMSGASPKESTNPEKAHETLHQSLSLASSPKGTIENILDNDPRDLIGDFSKGYLFHTVAGKHQDLKYISPEIMASVLNGKFANLIKEFVIIDCRYPYEYEGGHIKGAVNLHMEEEVEDFLLKKPIVPTDGKRVIVVFHCEFSSERGPRMCRYVRERDRLGNEYPKLHYPELYVLKGGYKEFFMKCQSYCEPPSYRPMHHEDFKEDLKKFRTKSRTWAGEKSKREMYSRLKKL

SEQ ID NO: 398 - DNA, 4508 bp, Homo sapien
cgggcagcgtggaccccggatgagttgcttttaggcttgctggcccgcggggctgtccaggcacgcgaggcccctcaggtacgccctctcttccctgcaggatccggccctcaaagacgagggtcacgcacgcgttacaaccccgaaacagtagcacaagatttaatttttaaaagagcgtgtttcttcggggcttgccgttcgttcgtttccagcctcaggaatttatggtcgcctttttgaatgagcaacaaaatgcttcaacaagttccagaaaacataaattttcctgctgaagaagagaaaatcttggagttttggactgaatttaattgttttcaggaatgcttaaagcaatcaaaacataaaccaaaatttaccttctatgatggtcctccttttgcaactggactgcctcactatggacatatacttgcgggtacaattaaagatatagttacaagatatgctcaccagagtgggtttcatgttgacagaagatttggatgggattgccatggcttacctgtggaatatgaaattgataagacactgggaatcagaggaccagaggatgtggccaaaatggggattacagagtataacaatcagtgccgagcaattgtgatgagatattctgctgagtggaagtctactgttagcagacttggccgatggattgactttgacaatgactataaaactctgtatccacaattcatggaatcagtctggtgggtcttcaaacaactctatgataaaggccttgtttatagaggtgtgaaagtcatgcccttctctacggcatgtaacactccactttccaacttcgagtcacaccagaattataaggatgttcaagatccttcagtatttgtaactttccctttggaagaagatgaaactgtatctttagttgcttggacaaccactccctggactctacctagtaaccttgctgtgtgtgttaatccagaaatgcaatatgtgaaaattaaagatgttgccagaggacgattactcattttaatggaagccagattgtcagccctctataaattggagagtgactatgagatccttgaaagatttcctggtgcctatcttaaaggcaagaagtacaggcccctgtttgactatttcctgaagtgtaaagagaatggcgctttcactgtgcttgttgacaactatgtgaaggaagaagaaggcacaggggttgtccaccaagctccttacttcggtgctgaggactatcgggtctgtatggactttaacattattcggaaagactcactccctgtttgccctgtggatgcttcaggctgcttcacaacggaggtgacagatttcgcaggacagtatgtgaaggatgctgacaaaagtatcatcaggactttgaaggaacaaggccgacttctggttgccaccaccttcactcacagctaccctttttgctggagatcagacactcctctaatttacaaagcagtgcccagctggtttgtgcgagtggagaacatggtggaccagctcctaaggaacaatgacctgtgctactgggtcccagagttggtacgagaaaaacgatttggaaattggctgaaagatgcacgtgactggacaatttccagaaacagatactggggcacccccatcccactgtgggtcagcgatgactttgaggaggtggtatgcattgggtcagtggcggaacttgaagaactgtcaggagcaaagatctcagatctccacagagagagtgttgaccacctgaccattccttcacgctgtgggaagggatccttgcaccgcatctctgaagtgtttgactgttggtttgagagtggcagcatgccctatgctcaggttcattacccgtttgaaaacaagagggagtttgaggatgcttttcctgcagatttcattgccgagggcatcgaccaaaccagaggatggttttataccctgctggtgctggccacggccctctttggacaaccgcctttcaagaacgtaattgtgaatgggcttgtcctggcaagtgatggccaaaaaatgagcaaacggaaaaagaattatccagatccagtttccatcatccagaagtatggtgctgatgccctcagattatatctgattaactcccctgtggtgagagcagaaaacctccgctttaaagaagagggtgtgcgggacgtccttaaggatgtactgctcccatggtacaatgcctatcgcttcttaatccagaacgttctgaggctccagaaggaggaagaaatagaatttctctacaatgagaacacggttagagaaagccccaacattacagaccggtggatcctgtccttcatgcagtctctcattggcttctttgagactgaaatggcagcttataggctttatactgtggtgcctcgcctggtcaagtttgtagatattctgaccaattggtatgttagaatgaaccgcagaagattaaagggtgaaaatgggatggaggattgtgtcatggccctagaaaccttgtttagtgttctgctttctctttgcagacttatagctccctacacaccttttctcactgaattgatgtaccagaatctaaaggtgctgattgaccctgtttctgttcaggacaaggacacactcagcattcactacctcatgctgccccgtgttcgagaagaattgattgacaagaaaacagagagtgcagtatctcagatgcagtctgtgattgaacttggaagagtgatcagagaccgaaaaactattcccataaagtatcctttgaaagaaattgtggttatccatcaagatccagaagctcttaaagatatcaagtctttggagaagtatatcattgaggaactcaatgttcgaaaagttacactgtctacagataaaaacaagtatggcattcggctaagggcagaaccagatcacatggtcctggggaagcgtctgaagggagcctttaaggcagtgatgacgtccatcaagcagttgagcagtgaggagctggagcagttccagaagactgggaccattgttgtggaaggccatgaattgcacgatgaagacatccgcctcatgtacacctttgatcaggccacaggtgggactgcgcaatttgaagcacactcagatgctcaggctttggtcctcttagatgtcactcctgaccagtcaatggtagatgaaggaatggctcgggaagtcatcaatcgcatacagaaacttcgcaaaaagtgcaatctggttccaactgatgaaatcacagtgtactataaagcaaagtctgaaggaacatatctgaatagtgttattgaaagccacacagagttcatatttaccaccataaaggctcccttgaaaccatatccagtttctccatcggataaagtccttattcaagaaaaaacacagttgaagggatctgaactggaaattacactcaccagaggatcttcccttcctggtcctgcttgtgcatatgtcaatcttaacatttgtgcaaatggcagtgaacaaggtggagtattgctcctggaaaatccaaaaggtgacaataggttggaccttttaaagctgaagagtgttgtcactagcatttttggtgtgaaaaatacagagctggctgtcttccatgatgaaacagaaatacaaaaccaaactgacttactgagtcttagtggaaaaacactttgtgtgactgcaggatcggctccctctctgatcaacagttctagtactcttctttgtcagtatatcaacctacagctcctgaatgcaaagccacaagagtgtttaatggggacagtgggcactctcctgcttgaaaacccacttgggcagaatggactcacccaccaaggtcttctgtatgaagcagccaaggtgtttggccttcggagcaggaagctaaagctgtttctgaatgagacccaaacgcaggaaattacagaagacatccccgtgaagactttgaatatgaagactgtgtatgtttctgtgttaccaacaacagcagacttctagcatgtacttatcaatgttgttcggtcagcccttccctaattacacctatcccctacacatacatgcacatagacacacacatgaacacactgaagatatttccttcaggtgtgtgtaaaatatgctgcttggattgaaattcaaatgggattgattagtcaagtaacttgagacctcacagtaatcttcacacttaaccttagacacctatgcagtcatgttgggagcaggttacaatgttacttcagcccacagtttatttctattcttgagttcttaagtacagaagatagaagtgatttaaatggcatagtatatatatcattttctggccttttaaaatttatttgagacctcttgatgaaatggacatattatatatttctgccacctggattttcctggataatttgatggaatattttaagtttcagtaaatcagaacaataaacaaactcagatat

SEQ ID NO: 399 - protein, 1262 aa, Homo sapien
MLQQVPENINFPAEEEKILEFWTEFNCFQECLKQSKHKPKFTFYDGPPFATGLPHYGHILAGTIKDIVTRYAHQSGFHVDRRFGWDCHGLPVEYEIDKTLGIRGPEDVAKMGITEYNNQCRAIVMRYSAEWKSTVSRLGRWIDFDNDYKTLYPQFMESVWWVFKQLYDKGLVYRGVKVMPFSTACNTPLSNFESHQNYKDVQDPSVFVTFPLEEDETVSLVAWTTTPWTLPSNLAVCVNPEMQYVKIKDVARGRLLILMEARLSALYKLESDYEILERFPGAYLKGKKYRPLFDYFLKCKENGAFTVLVDNYVKEEEGTGVVHQAPYFGAEDYRVCMDFNIIRKDSLPVCPVDASGCFTTEVTDFAGQYVKDADKSIIRTLKEQGRLLVATTFTHSYPFCWRSDTPLIYKAVPSWFVRVENMVDQLLRNNDLCYWVPELVREKRFGNWLKDARDWTISRNRYWGTPIPLWVSDDFEEVVCIGSVAELEELSGAKISDLHRESVDHLTIPSRCGKGSLHRISEVFDCWFESGSMPYAQVHYPFENKREFEDAFPADFIAEGIDQTRGWFYTLLVLATALFGQPPFKNVIVNGLVLASDGQKMSKRKKNYPDPVSIIQKYGADALRLYLINSPVVRAENLRFKEEGVRDVLKDVLLPWYNAYRFLIQNVLRLQKEEEIEFLYNENTVRESPNITDRWILSFMQSLIGFFETEMAAYRLYTVVPRLVKFVDILTNWYVRMNRRRLKGENGMEDCVMALETLFSVLLSLCRLIAPYTPFLTELMYQNLKVLIDPVSVQDKDTLSIHYLMLPRVREELIDKKTESAVSQMQSVIELGRVIRDRKTIPIKYPLKEIVVIHQDPEALKDIKSLEKYIIEELNVRKVTLSTDKNKYGIRLRAEPDHMVLGKRLKGAFKAVMTSIKQLSSEELEQFQKTGTIVVEGHELHDEDIRLMYTFDQATGGTAQFEAHSDAQALVLLDVTPDQSMVDEGMAREVINRIQKLRKKCNLVPTDEITVYYKAKSEGTYLNSVIESHTEFIFTTIKAPLKPYPVSPSDKVLIQEKTQLKGSELEITLTRGSSLPGPACAYVNLNICANGSEQGGVLLLENPKGDNRLDLLKLKSVVTSIFGVKNTELAVFHDETEIQNQTDLLSLSGKTLCVTAGSAPSLINSSSTLLCQYINLQLLNAKPQECLMGTVGTLLLENPLGQNGLTHQGLLYEAAKVFGLRSRKLKLFLNETQTQEITEDIPVKTLNMKTVYVSVLPTTADF

SEQ ID NO: 400 - DNA, 788 bp, Homo sapien
gaaaagcgcgcgcggggattccaggagtcgtggtttcttgccttgatgtactggagcaatcagatcacacggcggcttggagagtgagtgcaaggttttatgagtggaattagccctcagcagatgggggagccagaaggcagttggagtgggaagaacccagggaccatgggcgcctccaggctctataccctggtgctggtcctgcagcctcagcgagttctcctgggcatgaaaaagcgaggcttcggggccggccggtggaatggctttgggggcaaagtgcaagaaggagagaccatcgaggatggggctaggagggagctgcaggaggagagcggtctgacagtggacgccctgcacaaggtgggccagatcgtgtttgagttcgtgggcgagcctgagctcatggacgtgcatgtcttctgcacagacagcatccaggggacccccgtggagagcgacgaaatgcgcccatgctggttccagctggatcagatccccttcaaggacatgtggcccgacgacagctactggtttccactcctgcttcagaagaagaaattccacgggtacttcaagttccagggtcaggacaccatcctggactacacactccgcgaggtggacacggtctagcgggagcccagggcagcccctgggcaggagacgtggctgctgaacagctgcaaaccatcttcacctgggggcattgagtggcgcagagccgggtttcatctggaattaactggatggaagggaaaataaagctatctagcggtgaaaaa

SEQ ID NO: 401 - protein, 179 aa, Homo sapien
MSGISPQQMGEPEGSWSGKNPGTMGASRLYTLVLVLQPQRVLLGMKKRGFGAGRWNGFGGKVQEGETIEDGARRELQEESGLTVDALHKVGQIVFEFVGEPELMDVHVFCTDSIQGTPVESDEMRPCWFQLDQIPFKDMWPDDSYWFPLLLQKKKFHGYFKFQGQDTILDYTLREVDTV

SEQ ID NO: 402 - DNA, 2031 bp, Homo sapien
ggcacgaggcaggccacccgccgctaagctgagaagggagagcgagcttaggaccgcctgcccggggcaaccccgaaccaagctttagccgccgaggccgcgtgtcccaaaggccagtcatccctcctctgtgttgccatgggaattcaaggcctggccaaactaattgctgatgtggcccccagtgccatccgggagaatgacatcaagagctactttggccgtaaggtggccattgatgcctctatgagcatttatcagttcctgattgctgttcgccagggtggggatgtgctgcagaatgaggagggtgagaccaccagccacctgatgggcatgttctaccgcaccattcgcatgatggagaacggcatcaagcccgtgtatgtctttgatggcaagccgccacagctcaagtcaggcgagctggccaaacgcagtgagcggcgggctgaggcagagaagcagctgcagcaggctcaggctgctggggccgagcaggaggtggaaaaattcactaagcggctggtgaaggtcactaagcagcacaatgatgagtgcaaacatctgctgagcctcatgggcatcccttatcttgatgcacccagtgaggcagaggccagctgtgctgccctggtgaaggctggcaaagtctatgctgcggctaccgaggacatggactgcctcaccttcggcagccctgtgctaatgcgacacctgactgccagtgaagccaaaaagctgccaatccaggaattccacctgagccggattctgcaggagctgggcctgaaccaggaacagtttgtggatctgtgcatcctgctaggcagtgactactgtgagagtatccggggtattgggcccaagcgggctgtggacctcatccagaagcacaagagcatcgaggagatcgtgcggcgacttgaccccaacaagtaccctgtgccagaaaattggctccacaaggaggctcaccagctcttcttggaacctgaggtgctggacccagagtctgtggagctgaagtggagcgagccaaatgaagaagagctgatcaagttcatgtgtggtgaaaagcagttctctgaggagcgaatccgcagtggggtcaagaggctgagtaagagccgccaaggcagcacccagggccgcctggatgatttcttcaaggtgaccggctcactctcttcagctaagcgcaaggagccagaacccaagggatccactaagaagaaggcaaagactggggcagcagggaagtttaaaaggggaaaataaatgtgtttccccattatacctccttcaccccagaatatttgccgtcttgtacccttaagagctacagctagagaaaccttcacggggtggagagaggattctaaggcttttctagcgtgacccttttcagtagtgctagtcccttttttacttgatcttaatggcaagaaggccacagaggtacttttccttttttagctcaggaaaatatgtcaggctcaaaccacttctcaggcagtttaatggacactaagtccattgttacatgaaagtgatagatagcaacaagttttggagaagagagagggagataaaagggggagacaaaagatgtacagaaatgatttcctggctggccaactggtggccagtgggaggtgatggtggacctagactgtgcttttctgtcttgttcagccttgacccaccttgagagagagccaccaggaaggcgcatcttagcagatgggaggaactgctgagagaagatgggcagaaagctggagcccctggagttggctgtgtctgtgtttgtgactgattactggctgtgtcttgggtgggcagaaactcgaacttgctatgtaatttgtgtctagttattcagaggagtaagatggtgatgttcacctggcaatcagctgagttgagactttggaataagacactggttttcatgcgctgtttttgttttaaagttatgaagaaaaaagtcaataaaattctaaaagtaaaaaaaaaaaaaaaaaa

SEQ ID NO: 403 - protein, 380 aa, Homo sapien
MGIQGLAKLIADVAPSAIRENDIKSYFGRKVAIDASMSIYQFLIAVRQGGDVLQNEEGETTSHLMGMFYRTIRMMENGIKPVYVFDGKPPQLKSGELAKRSERRAEAEKQLQQAQAAGAEQEVEKFTKRLVKVTKQHNDECKHLLSLMGIPYLDAPSEAEASCAALVKAGKVYAAATEDMDCLTFGSPVLMRHLTASEAKKLPIQEFHLSRILQELGLNQEQFVDLCILLGSDYCESIRGIGPKRAVDLIQKHKSIEEIVRRLDPNKYPVPENWLHKEAHQLFLEPEVLDPESVELKWSEPNEEELIKFMCGEKQFSEERIRSGVKRLSKSRQGSTQGRLDDFFKVTGSLSSAKRKEPEPKGSTKKKAKTGAAGKFKRGK

SEQ ID NO: 404 - DNA, 2265 bp, Homo sapien
agtcctgcgatttcgggtgtagagggagcaggggcctgcggggacctggtgtgggtggagtggggacaagcggtggagaagggtacgccagggtcgctgagagactctgttctccctggagggactggttgccatgagagcagccgtctgaggggacgcagcctgcactacgcgccccaagaggctgtgcgtggcgagcaggtcacgtgacgggagcgcgggctttggaaggcggctgaacgtcaggccacccgccgctaagctgagaagggagagcgagcttaggaccgcctgcccggggcaaccccgaaccaagctttagccgccgaggccgcgtgtcccaaaggccagtcatccctcctctgtgttgccatgggaattcaaggcctggccaaactaattgctgatgtggcccccagtgccatccgggagaatgacatcaagagctactttggccgtaaggtggccattgatgcctctatgagcatttatcagttcctgattgctgttcgccagggtggggatgtgctgcagaatgaggagggtgagaccaccagccacctgatgggcatgttctaccgcaccattcgcatgatggagaacggcatcaagcccgtgtatgtctttgatggcaagccgccacagctcaagtcaggcgagctggccaaacgcagtgagcggcgggctgaggcagagaagcagctgcagcaggctcaggctgctggggccgagcaggaggtggaaaaattcactaagcggctggtgaaggtcactaagcagcacaatgatgagtgcaaacatctgctgagcctcatgggcatcccttatcttgatgcacccagtgaggcagaggccagctgtgctgccctggtgaaggctggcaaagtctatgctgcggctaccgaggacatggactgcctcaccttcggcagccctgtgctaatgcgacacctgactgccagtgaagccaaaaagctgccaatccaggaattccacctgagccggattctgcaggagctgggcctgaaccaggaacagtttgtggatctgtgcatcctgctaggcagtgactactgtgagagtatccggggtattgggcccaagcgggctgtggacctcatccagaagcacaagagcatcgaggagatcgtgcggcgacttgaccccaacaagtaccctgtgccagaaaattggctccacaaggaggctcaccagctcttcttggaacctgaggtgctggacccagagtctgtggagctgaagtggagcgagccaaatgaagaagagctgatcaagttcatgtgtggtgaaaagcagttctctgaggagcgaatccgcagtggggtcaagaggctgagtaagagccgccaaggcagcacccagggccgcctggatgatttcttcaaggtgaccggctcactctcttcagctaagcgcaaggagccagaacccaagggatccactaagaagaaggcaaagactggggcagcagggaagtttaaaaggggaaaataaatgtgtttccccattatacctccttcaccccagaatatttgccgtcttgtacccttaagagctacagctagagaaaccttcacggggtggagagaggattctaaggcttttctagcgtgacccttttcagtagtgctagtcccttttttacttgatcttaatggcaagaaggccacagaggtacttttccttttttagctcaggaaaatatgtcaggctcaaaccacttctcaggcagtttaatggacactaagtccattgttacatgaaagtgatagatagcaacaagttttggagaagagagagggagataaaagggggagacaaaagatgtacagaaatgatttcctggctggccaactggtggccagtgggaggtgatggtggacctagactgtgcttttctgtcttgttcagccttgacccaccttgagagagagccaccaggaaggcgcatcttagcagatgggaggaactgctgagagaagatgggcagaaagctggagcccctggagttggctgtgtctgtgtttgtgactgattactggctgtgtcttgggtgggcagaaactcgaacttgctatgtaatttgtgtctagttattcagaggagtaagatggtgatgttcacctggcaatcagctgagttgagactttggaataagacactggttttcatgcgctgtttttgttttaaagttatgaagaaaaaagtcaataaaattctaaaagtaaaaaaaaaaaaaaaaaa

SEQ ID NO: 405 - protein, 380 aa, Homo sapien; identical to SEQ ID NO: 403

SEQ ID NO: 406 - DNA, 1503 bp, Homo sapien
gcacgcccagcgagttccagaggcgccagtggaagctgcggcggcggtgtctcgcgttcggcgggatttctcttcgctccggctcggcctaggtctacgtccccagctccagccgccggctcggactcggtctctgacccccaactcggtcccctagtccggccccggctccgggccccccaaccctcgctccggcccggcccggcccccaccccagccctgccgcccggccccaggcccggccgcggccgctcccgcctggagccgccgcgcgcccccagcccccctgcaccccctcggcccctcgccttcctcttcccggcgcggccccccggcttccgcgcgccgcccgccaccaatcctcttgctaccatgtccgtggagctcgaggaggccctgccagtgacgaccgccgagggaatggccaagaaggtgaccaaggctggcggctcggcggcgttgtccccatctaagaagaggaagaatagcaagaagaagaaccagccgggcaagtacagccagctggtggtggagaccatccgtaggctgggcgagcgcaacggctcgtcgctggccaagatctacaccgaggccaagaaggttccgtggttcgaccagcagaatgggcgcacctacctcaagtactcgatcaaggcgctggtgcagaacgacacgcttctgcaggtgaagggcaccggcgccaacggttccttcaagctcaaccgcaagaagctggagggcggcggggagcggcgcggagccccggcggccgccaccgccccggcccccaccgcgcacaaagcgaagaaggcagccccgggcgcggccggctcccggcgcgcggacaagaagcccgccaggggccagaagccggagcagcgctcgcacaagaagggcgctggcgccaagaaggacaaaggcggcaaggccaagaagacggcggccgccgggggcaagaaggtgaagaaggcggccaagcccagcgtccccaaagtgcccaagggccgcaagtgagcgtgtcggccggtcagagcggccggcgtgggcttttcggtgtttttgtttttctaccccaagtgacgtagattttgtacggctcacgccggccggggccgcgaggcctggtctgagcctcagggaggggccccgggtcctctcagtctttcccctcccccaacgatgtagcgtttttcgttgtttgctttaggtttttgaaacagccccggcgacgcctctattggctctcggccttggcaacggccgtcgtcatggttactggcccctaggcgccgatggccgaggccgcgcctgcccaccgggcggggtcgctggttggccgggcccaggcgcgcggggacgcggaggccgcgcatcctttcccagctccccaccctccttgcctttgggtgcgcgacaaacaatcgctccgggctcagggctgcgcggctcttcccttcattccatgggcctttttttgggcacaataaagcgtttaaacctttc

SEQ ID NO: 407 - protein, 213 aa, Homo sapien
MSVELEEALPVTTAEGMAKKVTKAGGSAALSPSKKRKNSKKKNQPGKYSQLVVETIRRLGERNGSSLAKIYTEAKKVPWFDQQNGRTYLKYSIKALVQNDTLLQVKGTGANGSFKLNRKKLEGGGERRGAPAAATAPAPTAHKAKKAAPGAAGSRRADKKPARGQKPEQRSHKKGAGAKKDKGGKAKKTAAAGGKKVKKAAKPSVPKVPKGRK

SEQ ID NO: 408 - DNA, 2937 bp, Homo sapien; identical to SEQ ID NO: 11

SEQ ID NO: 409 - protein, 584 aa, Homo sapien; identical to SEQ ID NO: 12

SEQ ID NO: 410 - DNA, 1496 bp, Homo sapien
cgcactccctgctgggtgagcagcactgtaaagatgaagctggctaactggtactggctgagctcagctgttcttgccacttacggttttttggttgtggcaaacaatgaaacagaggaaattaaagatgaaagagcaaaggatgtctgcccagtgagactagaaagcagagggaaatgcgaagaggcaggggagtgcccctaccaggtaagcctgccccccttgactattcagctcccgaagcaattcagcaggatcgaggaggtgttcaaagaagtccaaaacctcaaggaaatcgtaaatagtctaaagaaatcttgccaagactgcaagctgcaggctgatgacaacggagacccaggcagaaacggactgttgttacccagtacaggagccccgggagaggttggtgataacagagttagagaattagagagtgaggttaacaagctgtcctctgagctaaagaatgccaaagaggagatcaatgtacttcatggtcgcctggagaagctgaatcttgtaaatatgaacaacatagaaaattatgttgacagcaaagtggcaaatctaacatttgttgtcaatagtttggatggcaaatgttcaaagtgtcccagccaagaacaaatacagtcacgtccagttcaacatctaatatataaagattgctctgactactacgcaataggcaaaagaagcagtgagacctacagagttacacctgatcccaaaaatagtagctttgaagtttactgtgacatggagaccatggggggaggctggacagtgctgcaggcacgtctcgatgggagcaccaacttcaccagaacatggcaagactacaaagcaggctttggaaacctcagaagggaattttggctggggaacgataaaattcatcttctgaccaagagtaaggaaatgattctgagaatagatcttgaagactttaatggtgtcgaactatatgccttgtatgatcagttttatgtggctaatgagtttctcaaatatcgtttacacgttggtaactataatggcacagctggagatgcattacgtttcaacaaacattacaaccacgatctgaagtttttcaccactccagataaagacaatgatcgatatccttctgggaactgtgggctgtactacagttcaggctggtggtttgatgcatgtctttctgcaaacttaaatggcaaatattatcaccaaaaatacagaggtgtccgtaatgggattttctggggtacctggcctggtgtaagtgaggcacaccctggtggctacaagtcctccttcaaagaggctaagatgatgatcagacccaagcactttaagccataaatcactctgttcattcctccaggtattcgttatctaatagggcaattaattccttcagcactttagaatatgccttgtttcatatttttcatagctaaaaaatgtttgacatcctttgagatattttattactaaaatctgcc

SEQ ID NO: 411 - protein, 439 aa, Homo sapien
MKLANWYWLSSAVLATYGFLVVANNETEEIKDERAKDVCPVRLESRGKCEEAGECPYQVSLPPLTIQLPKQFSRIEEVFKEVQNLKEIVNSLKKSCQDCKLQADDNGDPGRNGLLLPSTGAPGEVGDNRVRELESEVNKLSSELKNAKEEINVLHGRLEKLNLVNMNNIENYVDSKVANLTFVVNSLDGKCSKCPSQEQIQSRPVQHLIYKDCSDYYAIGKRSSETYRVTPDPKNSSFEVYCDMETMGGGWTVLQARLDGSTNFTRTWQDYKAGFGNLRREFWLGNDKIHLLTKSKEMILRIDLEDFNGVELYALYDQFYVANEFLKYRLHVGNYNGTAGDALRFNKHYNHDLKFFTTPDKDNDRYPSGNCGLYYSSGWWFDACLSANLNGKYYHQKYRGVRNGIFWGTWPGVSEAHPGGYKSSFKEAKMMIRPKHFKP

SEQ ID NO: 412 - DNA, 713 bp, Homo sapien
tcccagctgcgcgtcgcagtcccgacgcgagaagggctggagtcggcgtccagcctagagcccccggtgggagccaggccgggacgcgtgcaccatgccctacctgctcatcagcacccagatccgcatggaggtgggccccactatggtgggcgatgaacagtcggatccagagctgatgcagcatctgggggcttcaaagagaagagccttgggaaacaacttttatgaatactacgtcgatgaccctccccgcatagtcctggacaagctggaacgcaggggcttccgtgtgctgagcatgacgggggtgggccagacgctggtgtggtgtctgcacaaggagtgaccttctcatgctgatttgcagacggggcacccctgtggaggggctgctgtgggccctgacctccaagctcctgcctcaccgtctgccttgctcctctcttcccaaatcatcaccgccatgggcccagccccaaagggcagtgaatggccttctctgaaaccctgcgtcaagcagtgggagagggcagtgcccggtgccctggtgctcccagctgccctcctgcttcgggcctgggccgagggccttgtgtaggccatgttcctcgggcagctgccccgggccggagctgggcactccagcggccctggcgcgtggctcctgcatagctagcccaagccaataaagggctgtgatgagtggctgc

SEQ ID NO: 413 - protein, 84 aa, Homo sapien
MPYLLISTQIRMEVGPTMVGDEQSDPELMQHLGASKRRALGNNFYEYYVDDPPRIVLDKLERRGFRVLSMTGVGQTLVWCLHKE

SEQ ID NO: 414 - DNA, 1067 bp, Homo sapien
gcgtctgccaggagctacggccggaagatggcggcggccgcagagttgtcgctactggagaagtccctgggactgagtaaggggaataaatacagtgctcagggcgagcgacagattccagttcttcagacaaacaatggtccaagtctaacaggattgactactatagcagctcatctagtcaagcaagccaacaaagaatatttgctggggagtactgcagaagaaaaagcaatcgttcagcagtggttagaatacagggtcactcaagtagatgggcactccagtaaaaatgacatccacacactgttgaaggatcttaattcatatcttgaagataaagtctaccttacagggtataactttacattagcagatatactattgtactatggacttcatcgctttatagttgacctgacagttcaagaaaaggagaaatatcttaatgtgtctcgctggttttgtcacattcagcattatccaggcatcaggcaacatctgtctagtgttgtcttcatcaagaacagactatatactaattcccactagaagctgtccatgccatacagaagatctattaaaagtgttttaaatggaaaatgtactctagaccacaggactaatgtaaattaatatacagtcattcattatttgttgaagttgatagaatttttgaagtgtaaacttgtgtctgaatgttttatttgttctttagctgaagttttgcaatttttatgtcaaaattcaattgctattaaacaagttgagatccagttataaattaaccttgtttttagtagatgacatttatttcaataaaagttgcaaatcgggcttaatcttaaaattggtggtcatttcaatggttgacatatttggctatttattaacctctctttcatattctaaaattcattttccccttatggatatttatggtagtttgttaagaactgataaattgtgccaaggaagccaaaagggaagacagatggatttgttttaaaatgtttatgtgagctagtaaatgtgggaaaaaaaaaaaaaaaaaaaaaaaaaaaaaa

SEQ ID NO: 415 - protein, 174 aa, Homo sapien
MAAAAELSLLEKSLGLSKGNKYSAQGERQIPVLQTNNGPSLTGLTTIAAHLVKQANKEYLLGSTAEEKAIVQQWLEYRVTQVDGHSSKNDIHTLLKDLNSYLEDKVYLTGYNFTLADILLYYGLHRFIVDLTVQEKEKYLNVSRWFCHIQHYPGIRQHLSSVVFIKNRLYTNSH

SEQ ID NO: 416 - DNA, 2486 bp, Homo sapien
ccgggactttgcaggcagcggcggccgggggcggagcgggatcgagccctcgccgaggcctgccgccatgggcccgcgccgccgccgccgcctgtcacccgggccgcgcgggccgtgagcgtcatggccttggccggggcccctgcgggcggcccatgcgcgccggcgctggaggccctgctcggggccggcgcgctgcggctgctcgactcctcgcagatcgtcatcatctccgccgcgcaggacgccagcgccccgccggctcccaccggccccgcggcgcccgccgccggcccctgcgaccctgacctgctgctcttcgccacaccgcaggcgccccggcccacacccagtgcgccgcggcccgcgctcggccgcccgccggtgaagcggaggctggacctggaaactgaccatcagtacctggccgagagcagtgggccagctcggggcagaggccgccatccaggaaaaggtgtgaaatccccgggggagaagtcacgctatgagacctcactgaatctgaccaccaagcgcttcctggagctgctgagccactcggctgacggtgtcgtcgacctgaactgggctgccgaggtgctgaaggtgcagaagcggcgcatctatgacatcaccaacgtccttgagggcatccagctcattgccaagaagtccaagaaccacatccagtggctgggcagccacaccacagtgggcgtcggcggacggcttgaggggttgacccaggacctccgacagctgcaggagagcgagcagcagctggaccacctgatgaatatctgtactacgcagctgcgcctgctctccgaggacactgacagccagcgcctggcctacgtgacgtgtcaggaccttcgtagcattgcagaccctgcagagcagatggttatggtgatcaaagcccctcctgagacccagctccaagccgtggactcttcggagaactttcagatctcccttaagagcaaacaaggcccgatcgatgttttcctgtgccctgaggagaccgtaggtgggatcagccctgggaagaccccatcccaggaggtcacttctgaggaggagaacagggccactgactctgccaccatagtgtcaccaccaccatcatctcccccctcatccctcaccacagatcccagccagtctctactcagcctggagcaagaaccgctgttgtcccggatgggcagcctgcgggctcccgtggacgaggaccgcctgtccccgctggtggcggccgactcgctcctggagcatgtgcgggaggacttctccggcctcctccctgaggagttcatcagcctttccccaccccacgaggccctcgactaccacttcggcctcgaggagggcgagggcatcagagacctcttcgactgtgactttggggacctcacccccctggatttctgacagggcttggagggaccagggtttccagagtagctcaccttgtctctgcagccctggagccccctgtccctggccgtcctcccagcctgtttggaaacatttaatttatacccctctcctctgtctccagaagcttctagctctggggtctggctaccgctaggaggctgagcaagccaggaagggaaggagtctgtgtggtgtgtatgtgcatgcagcctacacccacacgtgtgtaccgggggtgaatgtgtgtgagcatgtgtgtgtgcatgtaccggggaatgaaggtgaacatacacctctgtgtgtgcactgcagacacgccccagtgtgtccacatgtgtgtgcatgagtccatctctgcgcgtgggggggctctaactgcactttcggcccttttgctcgtggggtcccacaaggcccagggcagtgcctgctcccagaatctggtgctctgaccaggccaggtggggaggctttggctggctgggcgtgtaggacggtgagagcacttctgtcttaaaggttttttctgattgaagctttaatggagcgttatttatttatcgaggcctctttggtgagcctggggaatcagcaaaaggggaggaggggtgtggggttgataccccaactccctctacccttgagcaagggcaggggtccctgagctgttcttctgccccatactgaaggaactgaggcctgggtgatttatttattgggaaagtgagggagggagacagactgactgacagccatgggtggtcagatggtggggtgggccctctccagggggccagttcagggcccagctgccccccaggatggatatgagatgggagaggtgagtgggggaccttcactgatgtgggcaggaggggtggtgaaggcctcccccagcccagaccctgtggtccctcctgcagtgtctgaagcgcctgcctccccactgctctgccccaccctccaatctgcactttgatttgcttcctaacagctctgttccctcctgctttggttttaataaatattttgatgacgtt

SEQ ID NO: 417 - protein, 437 aa, Homo sapien
MALAGAPAGGPCAPALEALLGAGALRLLDSSQIVIISAAQDASAPPAPTGPAAPAAGPCDPDLLLFATPQAPRPTPSAPRPALGRPPVKRRLDLETDHQYLAESSGPARGRGRHPGKGVKSPGEKSRYETSLNLTTKRFLELLSHSADGVVDLNWAAEVLKVQKRRIYDITNVLEGIQLIAKKSKNHIQWLGSHTTVGVGGRLEGLTQDLRQLQESEQQLDHLMNICTTQLRLLSEDTDSQRLAYVTCQDLRSIADPAEQMVMVIKAPPETQLQAVDSSENFQISLKSKQGPIDVFLCPEETVGGISPGKTPSQEVTSEEENRATDSATIVSPPPSSPPSSLTTDPSQSLLSLEQEPLLSRMGSLRAPVDEDRLSPLVAADSLLEHVREDFSGLLPEEFISLSPPHEALDYHFGLEEGEGIRDLFDCDFGDLTPLDF

SEQ ID NO: 418 - DNA, 487 bp, Homo sapien
ccttgctatagaagacctgggacagaggactgctgtctgccctctctggtcaccctgcctagctagaggatctgtgaccccagccatgaggaccctcgccatccttgctgccattctcctggtggccctgcaggcccaggctgagccactccaggcaagagctgatgaggttgctgcagccccggagcagattgcagcggacatcccagaagtggttgtttcccttgcatgggacgaaagcttggctccaaagcatccaggctcaaggaaaaacatggactgctattgcagaataccagcgtgcattgcaggagaacgtcgctatggaacctgcatctaccagggaagactctgggcattctgctgctgagcttgcagaaaaagaaaaatgagctcaaaatttgctttgagagctacagggaattgctattactcctgtaccttctgctcaatttcctttcctcatctcaaataaatgccttgttac

SEQ ID NO: 419 - protein, 94 aa, Homo sapien
MRTLAILAAILLVALQAQAEPLQARADEVAAAPEQIAADIPEVVVSLAWDESLAPKHPGSRKNMDCYCRIPACIAGERRYGTCIYQGRLWAFCC

SEQ ID NO: 420 - DNA, 2748 bp, Homo sapien
agcgggtgcggggcgggaccggcccggcctatatattgggttggcgccggcgccagctgagccgagcggtagctggtctggcgaggttttatacacctgaaagaagagaatgtcaagacgaagtagccgtttacaagctaagcagcagccccagcccagccagacggaatccccccaagaagcccagataatccaggccaagaagaggaaaactacccaggatgtcaaaaaaagaagagaggaggtcaccaagaaacatcagtatgaaattaggaattgttggccacctgtattatctggggggatcagtccttgcattatcattgaaacacctcacaaagaaataggaacaagtgatttctccagatttacaaattacagatttaaaaatctttttattaatccttcacctttgcctgatttaagctggggatgttcaaaagaagtctggctaaacatgttaaaaaaggagagcagatatgttcatgacaaacattttgaagttctgcattctgacttggaaccacagatgaggtccatacttctagactggcttttagaggtatgtgaagtatacacacttcatagggaaacattttatcttgcacaagacttttttgatagatttatgttgacacaaaaggatataaataaaaatatgcttcaactcattggaattacctcattattcattgcttccaaacttgaggaaatctatgctcctaaactccaagagtttgcttacgtcactgatggtgcttgcagtgaagaggatatcttaaggatggaactcattatattaaaggctttaaaatgggaactttgtcctgtaacaatcatctcctggctaaatctctttctccaagttgatgctcttaaagatgctcctaaagttcttctacctcagtattctcaggaaacattcattcaaatagctcagcttttagatctgtgtattctagccattgattcattagagttccagtacagaatactgactgctgctgccttgtgccattttacctccattgaagtggttaagaaagcctcaggtttggagtgggacagtatttcagaatgtgtagattggatggtaccttttgtcaatgtagtaaaaagtactagtccagtgaagctgaagacttttaagaagattcctatggaagacagacataatatccagacacatacaaactatttggctatgctggaggaagtaaattacataaacaccttcagaaaagggggacagttgtcaccagtgtgcaatggaggcattatgacaccaccgaagagcactgaaaaaccaccaggaaaacactaaagaagataactaagcaaacaagttggaattcaccaagattgggtagaactggtatcactgaactactaaagttttacagaaagtagtgctgtgattgattgccctagccaattcacaagttacactgccattctgattttaaaacttacaattggcactaaagaatacatttaattatttcctatgttagctgttaaagaaacagcaggacttgtttacaaagatgtcttcattcccaaggttactggatagaagccaaccacagtctataccatagcaatgtttttcctttaatccagtgttactgtgtttatcttgataaactaggaattttgtcactggagttttggactggataagtgctaccttaaagggtatactaagtgatacagtactttgaatctagttgttagattctcaaaattcctacactcttgactagtgcaatttggttcttgaaaattaaatttaaacttgtttacaaaggtttagttttgtaataaggtgactaatttatctatagctgctatagcaagctattataaaacttgaatttctacaaatggtgaaatttaatgttttttaaactagtttatttgccttgccataacacattttttaactaataaggcttagatgaacatggtgttcaacctgtgctctaaacagtgggagtaccaaagaaattataaacaagataaatgctgtggctccttcctaactggggctttcttgacatgtaggttgcttggtaataacctttttgtatatcacaatttgggtgaaaaacttaagtaccctttcaaactatttatatgaggaagtcactttactactctaagatatccctaaggaatttttttttttaatttagtgtgactaaggctttatttatgtttgtgaaactgttaaggtcctttctaaattcctccattgtgagataaggacagtgtcaaagtgataaagcttaacacttgacctaaacttctattttcttaaggaagaagagtattaaatatatactgactcctagaaatctatttattaaaaaaagacatgaaaacttgctgtacataggctagctatttctaaatattttaaattagcttttctaaaaaaaaaatccagcctcataaagtagattagaaaactagattgctagtttattttgttatcagatatgtgaatctcttctccctttgaagaaactatacatttattgttacggtatgaagtcttctgtatagtttgtttttaaactaatatttgtttcagtattttgtctgaaaagaaaacaccactaattgtgtacatatgtattatataaacttaaccttttaatactgtttatttttagcccattgtttaaaaaataaaagttaaaaaaatttaactgcttaaaagtaaaaaaaaaaaaaaaaaaa

SEQ ID NO: 421 - protein, 404 aa, Homo sapien
MSRRSSRLQAKQQPQPSQTESPQEAQIIQAKKRKTTQDVKKRREEVTKKHQYEIRNCWPPVLSGGISPCIIIETPHKEIGTSDFSRFTNYRFKNLFINPSPLPDLSWGCSKEVWLNMLKKESRYVHDKHFEVLHSDLEPQMRSILLDWLLEVCEVYTLHRETFYLAQDFFDRFMLTQKDINKNMLQLIGITSLFIASKLEEIYAPKLQEFAYVTDGACSEEDILRMELIILKALKWELCPVTIISWLNLFLQVDALKDAPKVLLPQYSQETFIQIAQLLDLCILAIDSLEFQYRILTAAALCHFTSIEVVKKASGLEWDSISECVDWMVPFVNVVKSTSPVKLKTFKKIPMEDRHNIQTHTNYLAMLEEVNYINTFRKGGQLSPVCNGGIMTPPKSTEKPPGKH

SEQ ID NO: 422 - DNA, 1994 bp, Homo sapien
aaacttcccgcacgcgttacaggagccaggtcggtataagcgccagcggcctcgccgcccgtcaagctgtccacatccctggcctcagcccgccacatcaccctgacctgcttacgcccagattttcttcaatcacatctgaataaatcacttgaagaaagcttatagcttcattgcaccatgtgtggcatttgggcgctgtttggcagtgatgattgcctttctgttcagtgtctgagtgctatgaagattgcacacagaggtccagatgcattccgttttgagaatgtcaatggatacaccaactgctgctttggatttcaccggttggcggtagttgacccgctgtttggaatgcagccaattcgagtgaagaaatatccgtatttgtggctctgttacaatggtgaaatctacaaccataagaagatgcaacagcattttgaatttgaataccagaccaaagtggatggtgagataatccttcatctttatgacaaaggaggaattgagcaaacaatttgtatgttggatggtgtgtttgcatttgttttactggatactgccaataagaaagtgttcctgggtagagatacatatggagtcagacctttgtttaaagcaatgacagaagatggatttttggctgtatgttcagaagctaaaggtcttgttacattgaagcactccgcgactccctttttaaaagtggagccttttcttcctggacactatgaagttttggatttaaagccaaatggcaaagttgcatccgtggaaatggttaaatatcatcactgtcgggatgaacccctgcacgccctctatgacaatgtggagaaactctttccaggttttgagatagaaactgtgaagaacaacctcaggatcctttttaataatgctgtaaagaaacgtttgatgacagacagaaggattggctgccttttatcagggggcttggactccagcttggttgctgccactctgttgaagcagctgaaagaagcccaagtacagtatcctctccagacatttgcaattggcatggaagacagccccgatttactggctgctagaaaggtggcagatcatattggaagtgaacattatgaagtcctttttaactctgaggaaggcattcaggctctggatgaagtcatattttccttggaaacttatgacattacaacagttcgtgcttcagtaggtatgtatttaatttccaagtatattcggaagaacacagatagcgtggtgatcttctctggagaaggatcagatgaacttacgcagggttacatatattttcacaaggctccttctcctgaaaaagccgaggaggagagtgagaggcttctgagggaactctatttgtttgatgttctccgcgcagatcgaactactgctgcccatggtcttgaactgagagtcccatttctagatcatcgattttcttcctattacttgtctctgccaccagaaatgagaattccaaagaatgggatagaaaaacatctcctgagagagacgtttgaggattccaatctgatacccaaagagattctctggcgaccaaaagaagccttcagtgatggaataacttcagttaagaattcctggtttaagattttacaggaatacgttgaacatcaggttgatgatgcaatgatggcaaatgcagcccagaaatttcccttcaatactcctaaaaccaaagaaggatattactaccgtcaagtctttgaacgccattacccaggccgggctgactggctgagccattactggatgcccaagtggatcaatgccactgacccttctgcccgcacgctgacccactacaagtcagctgtcaaagcttaggtggtctttatgctgtaatgtgaaagcaaatatttcttcgtgttggatggggactgtgggtagataggggaacaatgagagtcaactcaggctaacttgggtgtgaaaaaaataaaagtcctaaatct

SEQ ID NO: 423 - protein, 561 aa, Homo sapien
MCGIWALFGSDDCLSVQCLSAMKIAHRGPDAFRFENVNGYTNCCFGFHRLAVVDPLFGMQPIRVKKYPYLWLCYNGEIYNHKKMQQHFEFEYQTKVDGEIILHLYDKGGIEQTICMLDGVFAFVLLDTANKKVFLGRDTYGVRPLFKAMTEDGFLAVCSEAKGLVTLKHSATPFLKVEPFLPGHYEVLDLKPNGKVASVEMVKYHHCRDEPLHALYDNVEKLFPGFEIETVKNNLRILFNNAVKKRLMTDRRIGCLLSGGLDSSLVAATLLKQLKEAQVQYPLQTFAIGMEDSPDLLAARKVADHIGSEHYEVLFNSEEGIQALDEVIFSLETYDITTVRASVGMYLISKYIRKNTDSVVIFSGEGSDELTQGYIYFHKAPSPEKAEEESERLLRELYLFDVLRADRTTAAHGLELRVPFLDHRFSSYYLSLPPEMRIPKNGIEKHLLRETFEDSNLIPKEILWRPKEAFSDGITSVKNSWFKILQEYVEHQVDDAMMANAAQKFPFNTPKTKEGYYYRQVFERHYPGRADWLSHYWMPKWINATDPSARTLTHYKSAVKA

SEQ ID NO: 424 - DNA, 1414 bp, Homo sapien
ggcacgaggcagcaaaatggcgccagaactagtggcgggctgaggacgccgtacccctcggaaggcagccctgcggtccctttgccgcccgttccctcccggacatggaggacgtggaggcgcgcttcgcccacctcttgcagcccatccgcgacctcaccaagaactgggaggtggacgtggcggcccagctgggcgagtatctggaggagctggatcagatctgcatttcttttgacgaaggcaagaccacaatgaacttcattgaggcagcgttgttgatccagggctctgcctgcgtctacagtaagaaggtggaatacctctactcactcgtctaccaggcccttgatttcatctctggaaagaggcgggccaagcagctctcttcggtgcaggaggacagggccaatggggttgccagctccggggtcccccaggaggcagagaatgagttcctgtcgctggatgacttccctgactcccggactaacgtggatctcaagaatgatcagacgcccagtgaggtcctcatcatccccctcctgcccatggccctggtggcccctgatgaaatggagaagaacaacaatcccctgtacagccgtcagggtgaggtcctggccagccggaaggatttcaggatgaacacgtgcgttccccaccccagaggggccttcatgttggagccagagggcatgtcccccatggaaccagcgggcgtttcccccatgccagggacccagaaggacaccgggaggactgaggagcagccaatggaagtttccgtgtgcaggagccctgtcccagcactcggcttctcccaggagccaggcccctctccagaaggcccgatgcccctgggtgggggcgaggacgaggatgcagaggaggcagtagagcttcctgaggcctcggcccccaaggccgctctggagcccaaggagtccaggagcccgcagcaggtgggacccacatggaggcctgcagaacctgagctgtgaactggcaaccctggctctggggccgagtcaccttgcacaaggaggacagtggtatggccttggccccagaccactggtctggggcagaagcccacctgtcttgcagcccgtcctgcaaccagcccttttgaagagcagcttctgtgttcctcccctctctgagcagaactgatgctcctcagagtagtgggctggcgtccaaggatttgagccctgtcgagctcacggcaacctgggatggccgccggttgccaaggcgcctctctgcagtcgggctggtaggagggagtgtctggaggccattgctgcctccctcaacccccggggtcaactgtacccagcctagagccaagaaatccttcctttttattcattaaaacaaaatcaacctgaaaaaaaaaaaaaaaaaa

SEQ ID NO: 425 - protein, 287 aa, Homo sapien
MALVAPDEMEKINNPLYSRQGEVLASRKDFRMNTCVPHPRRAFMLEPEGMSPMEPAGVSPMPGTQNDTGRTEEQPMEVSVCRSPVPALGFSQEPGPSPERPMPLGGGEDEDAEEAVELPEASAPKAALEPKESRSPQQSAALPRRYMLREREGAPEPASCVKETPDLWQSLDPLNSLESKPFKKGRPYSVPPCVEEALGQKRKRKGAAKLQDFHQWYLVAYADHADSRRLRRKGPSFADMEVLYWTHVKEQLETLRKLQRREVAEQWLRPAEEDHLEDSPGRPGGSR

SEQ ID NO: 426 - DNA, 2214 bp, Homo sapien
ttggaaccagagagaagccgggatggaaactccaaacaccacagaggactatgacacgaccacagagtttgactatggggatgcaactccgtgccagaaggtgaacgagagggcctttggggcccaactgctgccccctctgtactccttggtatttgtcattggcctggttggaaacatcctggtggtcctggtccttgtgcaatacaagaggctaaaaaacatgaccagcatctacctcctgaacctggccatttctgacctgctcttcctgttcacgcttcccttctggatcgactacaagttgaaggatgactgggtttttggtgatgccatgtgtaagatcctctctgggttttattacacaggcttgtacagcgagatctttttcatcatcctgctgacgattgacaggtacctggccatcgtccacgccgtgtttgccttgcgggcacggaccgtcacttttggtgtcatcaccagcatcatcatttgggccctggccatcttggcttccatgccaggcttatacttttccaagacccaatgggaattcactcaccacacctgcagccttcactttcctcacgaaagcctacgagagtggaagctgtttcaggctctgaaactgaacctctttgggctggtattgcctttgttggtcatgatcatctgctacacagggattataaagattctgctaagacgaccaaatgagaagaaatccaaagctgtccgtttgatttttgtcatcatgatcatcttttttctcttttggaccccctacaatttgactatacttatttctgttttccaagacttcctgttcacccatgagtgtgagcagagcagacatttggacctggctgtgcaagtgacggaggtgatcgcctacacgcactgctgtgtcaacccagtgatctacgccttcgttggtgagaggttccggaagtacctgcggcagttgttccacaggcgtgtggctgtgcacctggttaaatggctccccttcctctccgtggacaggctggacagggtcagctccacatctccctccacaggggagcatgaactctctgctgggttctgactcagaccataggaggccaacccaaaataagcaggcgtgacctgccaggcacactgagccagcagcctggctctcccagccaggttctgactcttggcacagcatggagtcacagccacttgggatagagagggaatgtaatggtggcctggggcttctgaggcttctggggcttcagtcttttccatgaacttctcccctggtagaaagaagatgaatgagcaaaaccaaatattccagagactgggactaatgtaccagagaagggcttggactcaagcaagatttcagatttgtgaccattagcatttgtcaacaaagtcacccacttcccactattgcttgcacaaaccaattaaacccagtagtggtgactgtgggctccattcaaagtgagctcctaagccatgggagacactgatgtatgaggaatttctgttcttccatcacctccccccccccgccaccctcccactgccaaagaacttggaaatagtgatttccacagtgactccactctgagtcccagagccaatcagtagccagcatctgcctccccttcactcccaccgcagatttgggctcttggaatcctggggaacatagaactcatgacggaagagttgagacctaacgagaaatagaaatggggaactactgctggcagtggaactaagaaagcccttaggaagaatttttatatccactaaaatcaaacaattcagggagtgggctaagcacgggccatatgaataacatggtgtgcttcttaaaatagccataaaggggagggactcatcatttccatttacccttcttttctgactatttttcagaatctctcttcttttcaagttgggtgatatgttggtagattctaatggctttattgcagcggttaataacaggcaaaaggaagcagggttggtttcccttctttttgttcttcatctaagccttctggttttatgggtcagagttccgactgccatcttggacttgtcagcaaaaaaaaataataataataataataaggcctgctgtgtaagctgacagtatttgtagctgatagggggttgggaggaagtgtctactaggagggtgggtgagatctgtgttgatgt

SEQ ID NO: 427 - protein, 355 aa, Homo sapien [sequence omitted]

SEQ ID NO: 428 - DNA, 2156 bp, Homo sapien
ggcacgagcccagaaacaaagacttcacggacaaagtcccttggaaccagagagaagccgggatggaaactccaaacaccacagaggactatgacacgaccacagagtttgactatggggatgcaactccgtgccagaaggtgaacgagagggcctttggggcccaactgctgccccctctgtactccttggtatttgtcattggcctggttggaaacatcctggtggtcctggtccttgtgcaatacaagaggctaaaaaacatgaccagcatctacctcctgaacctggccatttctgacctgctcttcctgttcacgcttcccttctggatcgactacaagttgaaggatgactgggtttttggtgatgccatgtgtaagatcctctctgggttttattacacaggcttgtacagcgagatctttttcatcatcctgctgacgattgacaggtacctggccatcgtccacgccgtgtttgccttgcgggcacggaccgtcacttttggtgtcatcaccagcatcatcatttgggccctggccatcttggcttccatgccaggcttatacttttccaagacccaatgggaattcactcaccacacctgcagccttcactttcctcacgaaagcctacgagagtggaagctgtttcaggctctgaaactgaacctctttgggctggtattgcctttgttggtcatgatcatctgctacacagggattataaagattctgctaagacgaccaaatgagaagaaatccaaagctgtccgtttgatttttgtcatcatgatcatcttttttctcttttggaccccctacaatttgactatacttatttctgttttccaagacttcctgttcacccatgagtgtgagcagagcagacatttggacctggctgtgcaagtgacggaggtgatcgcctacacgcactgctgtgtcaacccagtgatctacgccttcgttggtgagaggttccggaagtacctgcggcagttgttccacaggcgtgtggctgtgcacctggttaaatggctccccttcctctccgtggacaggctggagagggtcagctccacatctccctccacaggggagcatgaactctctgctgggttctgactcagaccataggaggccaacccaaaataagcaggcgtgacctgccaggcacactgagccagcagcctggctctcccagccaggttctgactcttggcacagcatggagtcacagccacttgggatagagagggaatgtaatggtggcctggggcttctgaggcttctggggcttcagtcttttccatgaacttctcccctggtagaaagaagatgaatgagcaaaaccaaatattccagagactgggactaagtgtaccagagaagggcttggactcaagcaagatttcagatttgtgaccattagcatttgtcaacaaagtcacccacttcccactattgcttgcacaaaccaattaaacccagtagtggtgactgtgggctccattcaaagtgagctcctaagccatgggagacactgatgtatgaggaatttctgttcttccatcacctccccccccccgccaccctcccactgccaagaacttggaaatagtgatttccacagtgactccactctgagtcccagagccaatcagtagccagcatctgcctccccttcactcccaccgcaggatttgggctcttggaatcctggggaacatagaactcatgacggaagagttgagacctaacgagaaatagaaatgggggaactactgctggcagtggaactaagaaagcccttaggaagaatttttatatccactaaaatcaaacaattcagggagtgggctaagcacgggccatatgaataacatggtgtgcttcttaaaatagccataaaggggagggactcatcatttccatttacccttcttttctgactatttttcagaatctctcttcttttcaagttgggtgatatgttggtagattctaatggctttattgcagcgattaataacaggcaaaaggaagcagggttggtttcccttctttttgttcttcatctaagccttctggttttatgggtcagagttccgactgccatcttggacttgtcagcaaaaaaaaaaaaaaaaa

SEQ ID NO: 429 - protein, 355 aa, Homo sapien
METPNTTEDYDTTTEFDYGDATPCQKVNERAFGAQLLPPLYSLVFVIGLVGNILVVLVLVQYKRLKNMTSIYLLNLAISDLLFLFTLPFWIDYKLKDDWVFGDAMCKILSGFYYTGLYSEIFFIILLTIDRYLAIVHAVFALRARTVTFGVITSIIIWALAILASMPGLYFSKTQWEFTHHTCSLHFPHESLREWKLFQALKLNLFGLVLPLLVMIICYTGIIKILLRRPNEKKSKAVRLIFVIMIIFFLFWTPYNLTILISVFQDFLFTHECEQSRHLDLAVQVTEVIAYTHCCVNPVIYAFVGERFRKYLRQLFHRRVAVHLVKWLPFLSVDRLERVSSTSPSTGEHELSAGF

SEQ ID NO: 430 - DNA, 776 bp, Homo sapien
aaggacacgggcagcagacagtggtcagtcctttcttggctctgctgacactcgagcccacattccgtcacctgctcagaatcatgcaggtctccactgctgcccttgctgtcctcctctgcaccatggctctctgcaaccagttctctgcatcacttgctgctgacacgccgaccgcctgctgcttcagctacacctcccggcagattccacagaatttcatagctgactactttgagacgagcagccagtgctccaagcccggtgtcatcttcctaaccaagcgaagccggcaggtctgtgctgaccccagtgaggagtgggtccagaaatatgtcagcgacctagagctgagtgcctgaggggtccagaagcttcgaggcccagcgacctcggtgggccagtggggaggagcaggagcctgagccttgggaaacatgcgtgtgacctccacagctacctcttctatggactggttgttgccaaacagccacactgtgggactcttcttaacttaaattttaatttatttatactatttagtttttgtaatttattttcgatttcacagtgtgtttgtgattgtttgctctgagagttcccctgtcccctcccccttccctcacaccgcgtctggtgacaaccgagtggctgtcatcagcctgtgtaggcagtcatggcaccaaagccaccagactgacaaatgtgtatcggatgcttttgttcagggctgtgatcggcctggggaaataataaagcacgctcttttaaaaggt

SEQ ID NO: 431 - protein, 92 aa, Homo sapien
MQVSTAALAVLLCTMALCNQFSASLAADTPTACCFSYTSRQIPQNFIADYFETSSQCSKPGVIFLTKRSRQVCADPSEEWVQKYVSDLELSA

SEQ ID NO: 432 - DNA, 538 bp, Homo sapien
gctacactagagcagagtacgagtctgaggcggagggagtaatggcaggacaagcgtttagaaagtttcttccactctttgaccgagtattggttgaaaggagtgctgctgaaactgtaaccaaaggaggcattatgcttccagaaaaatctcaaggaaaagtattgcaagcaacagtagtcgctgttggatcgggttctaaaggaaagggtggagagattcaaccagttagcgtgaaagttggagataaagttcttctcccagaatatggaggcaccaaagtagttctagatgacaaggattatttcctatttagagatggtgacattcttggaaagtacgtagactgaaataagtcactattgaaatggcatcaacatgatgctgcccattccactgaagttctgaaatctttcgtcatgtaaataatttccatatttctcttttataataaactaatgataactaatgacatccagtgtctccaaaattgtttccttgtactgatataaacacttccaaataaaaatatgtaaat

SEQ ID NO: 433 - protein, 102 aa, Homo sapien
MAGQAFRKFLPLFDRVLVERSAAETVTKGGIMLPEKSQGKVLQATVVAVGSGSKGKGGEIQPVSVKVGDKVLLPEYGGTKVVLDDKDYFLFRDGDILGKYVD

SEQ ID NO: 434 - DNA, 1627 bp, Homo sapien
ctccgctgctgtcgccaggagtcacttcacgagaagccaggtcacaaccgtcggcccttgtctggaaaagtaaaagtggatcctgccacgttcggagctccctggcgcctcgcccggctggagctagagaactcgtcctgtggcggcccccggcgtggggcgggacagcggccccctggagggggcagtcccgggagaacctgcggcggccggagcggtaaaaataagtgactaaagaagcagacctgggaatcacctaacatgtcgaggaggagatttgattgccgaagtatttcaggcctactaactacaactcctcaaattccaataaaaatggaaaactttaataatttctatatacttacatctaaagagctagggagaggaaaatttgctgtggttagacaatgtatatcaaaatctactggccaagaatatgctgcaaaatttctaaaaaagagaagaagaggacaggattgtcgggcagaaattttacacgagattgctgtgcttgaattggcaaagtcttgtccccgtgttattaatcttcatgaggtctatgaaaatacaagtgaaatcattttgatattggaatatgctgcaggtggagaaattttcagcctgtgtttacctgagttggctgaaatggtttctgaaaatgatgttatcagactcattaaacaaatacttgaaggagtttattatctacatcagaataacattgtacaccttgatttaaagccacagaatatattactgagcagcatataccctctcggggacattaaaatagtagattttggaatgtctcgaaaaatagggcatgcgtgtgaacttcgggaaatcatgggaacaccagaatatttagctccagaaatcctgaactatgatcccattaccacagcaacagatatgtggaatattggtataatagcatatatgttgttaactcacacatcaccatttgtgggagaagataatcaagaaacatacctcaatatttctcaagttaatgtagattattcggaagaaactttttcatcagtttcacagctggccacagactttattcagagccttttagtaaaaaatccagagaaaagaccaacagcagagatatgcctttctcattcttggctacagcagtgggactttgaaaacttgtttcaccctgaagaaacttccagttcctctcaaactcaggatcattctgtaaggtcctctgaagacaagacttctaaatcctcctgtaatggaacctgtggtgatagagaagacaaagagaatatcccagaggatagcagcatggtttccaaaagatttcgtttcgatgactcattacccaatccccatgaacttgtttcagatttgctctgttagcacttttttctttgactcatttggactgaatttgaaattttatatccactccagtgagattatgatttgtagcttcatatatgacatgtttatattgtaaatgcacttttccatggaataatttagggaagtgttttaatgttaaattactagttgctagcatgttatgatttcatatcctgagatagctctgcagataagaaaatatttaaatatatgacaaaaagtaaaattgtacatgtgaaag

SEQ ID NO: 435 - protein, 372 aa, Homo sapien
MSRRRFDCRSISGLLTTTPQIPIKMENFNNFYILTSKELGRGKFAVVRQCISKSTGQEYAAKFLKKRRRGQDCRAEILHEIAVLELAKSCPRVINLHEVYENTSEIILILEYAAGGEIFSLCLPELAEMVSENDVIRLIKQILEGVYYLHQNNIVHLDLKPQNILLSSIYPLGDIKIVDFGMSRKIGHACELREIMGTPEYLAPEILNYDPITTATDMWNIGIIAYMLLTHTSPFVGEDNQETYLNISQVNVDYSEETFSSVSQLATDFIQSLLVKNPEKRPTAEICLSHSWLQQWDFENLFHPEETSSSSQTQDHSVRSSEDKTSKSSCNGTCGDREDKENIPEDSSMVSKRFRFDDSLPNPHELVSDLLC

SEQ ID NO: 436 - DNA, 2984 bp, Homo sapien
taactgagcgaggagcaattgattaatagctcggcgaggggactcactgactgttataataacactacaccagcaactcctggcttcccagcagccggaacacagacaggagagagtcagtggcaaatagacatttttcttatttcttaaaaaacagcaacttgtttgctacttttatttctgttgatttttttttcttggtgtgtgtggtggttgtttttaagtgtggagggcaaaaggagataccatcccaggctcagtccaacccctctccaaaacggcttttctgacactccaggtagcgagggagttgggtctccaggttgtgcgaggagcaaatgatgaccgccaaggccgtagacaaaatcccagtaactctcagtggttttgtgcaccagctgtctgacaacatctacccggtggaggacctcgccgccacgtcggtgaccatctttcccaatgccgaactgggaggcccctttgaccagatgaacggagtggccggagatggcatgatcaacattgacatgactggagagaagaggtcgttggatctcccatatcccagcagctttgctcccgtctctgcacctagaaaccagaccttcacttacatgggcaagttctccattgaccctcagtaccctggtgccagctgctacccagaaggcataatcaatattgtgagtgcaggcatcttgcaaggggtcacttccccagcttcaaccacagcctcatccagcgtcacctctgcctcccccaacccactggccacaggacccctgggtgtgtgcaccatgtcccagacccagcctgacctggaccacctgtactctccgccaccgcctcctcctccttattctggctgtgcaggagacctctaccaggacccttctgcgttcctgtcagcagccaccacctccacctcttcctctctggcctacccaccacctccttcctatccatcccccaagccagccacggacccaggtctcttcccaatgatcccagactatcctggattctttccatctcagtgccagagagacctacatggtacagctggcccagaccgtaagccctttccctgcccactggacaccctgcgggtgccccctccactcactccactctctacaatccgtaactttaccctggggggccccagtgctggggtgaccggaccaggggccagtggaggcagcgagggaccccggctgcctggtagcagctcagcagcagcagcagccgccgccgccgccgcctataacccacaccacctgccactgcggcccattctgaggcctcgcaagtaccccaacagacccagcaagacgccggtgcacgagaggccctacccgtgcccagcagaaggctgcgaccggcggttctcccgctctgacgagctgacacggcacatccgaatccacactgggcataagcccttccagtgtcggatctgcatgcgcaacttcagccgcagtgaccacctcaccacccatatccgcacccacaccggtgagaagcccttcgcctgtgactactgtggccgaaagtttgcccggagtgatgagaggaagcgccacaccaagatccacctgagacagaaagagcggaaaagcagtgccccctctgcatcggtgccagccccctctacagcctcctgctctgggggcgtgcagcctgggggtaccctgtgcagcagtaacagcagcagtcttggcggagggccgctcgccccttgctcctctcggacccggacaccttgagatgagactcaggctgatacaccagctcccaaaggtcccggaggccctttgtccactggagctgcacaacaaacactaccaccctttcctgtccctctctccctttgttgggcaaagggctttggtggagctagcactgccccctttccacctagaagcaggttcttcctaaaacttagcccattctagtctctcttaggtgagttgactatcaacccaaggcaaaggggaggctcagaaggaggtggtgtggggatcccctggccaagagggctgaggtctgaccctgctttaaagggttgtttgactaggttttgctaccccacttccccttattttgacccatcacaggtttttgaccctggatgtcagagttgatctaagacgttttctacaataggttgggagatgctgatcccttcaagtggggacagcaaaaagacaagcaaaactgatgtgcactttatggcttgggactgatttgggggacattgtacagtgagtgaagtatagcctttatgccacactctgtggccctaaaatggtgaatcagagcatatctagttgtctcaacccttgaagcaatatgtattatatactcagagaacagaagtgcaatgtgatgggaggaacgtagcaatatctgctccttttcgagttgtttgagaaatgtaggctattttttcagtgtatatccactcagattttgtgtatttttgatgtacccacactgttctctaaattctgaatctttgggaaaaaatgtaaagcatttatgatctcagaggttaacttatttaagggggatgtacatattctctgaaactaggatgcatgcaattgtgttggaagtgtccttggtcgccttgtgtgatgtagacaaatgttacaaggctgcatgtaaatgggttgccttattatggagaaaaaaatcactccctgagtttagtatggctgtatatttatgcctattaatatttggaattttttttagaaagtatatttttgtatgctttgttttgtgacttaaaagtgttacctttgtagtcaaatttcagataagaatgtacataatgttaccggagctgatttgtttggtcattagctcttaatagttgtgaaaaaataaatctattctaacgcaaaaccactaactgaagttcagatataatggatggtttgtgactatagtgtaaataaatacttttcaacaat

SEQ ID NO: 437 - protein, 476 aa, Homo sapien
MMTAKAVDKIPVTLSGFVHQLSDNIYPVEDLAATSVTIFPNAELGGPFDQMNGVAGDGMINIDMTGEKRSLDLPYPSSFAPVSAPRNQTFTYMGKFSIDPQYPGASCYPEGIINIVSAGILQGVTSPASTTASSSVTSASPNPLATGPLGVCTMSQTQPDLDHLYSPPPPPPPYSGCAGDLYQDPSAFLSAATTSTSSSLAYPPPPSYPSPKPATDPGLFPMIPDYPGFFPSQCQRDLHGTAGPDRKPFPCPLDTLRVPPPLTPLSTIRNFTLGGPSAGVTGPGASGGSEGPRLPGSSSAAAAAAAAAAYNPHHLPLRPILRPRKYPNRPSKTPVHERPYPCPAEGCDRRFSRSDELTRHIRIHTGHKPFQCRICMRNFSRSDHLTTHIRTHTGEKPFACDYCGRKFARSDERKRHTKIHLRQKERKSSAPSASVPAPSTASCSGGVQPGGTLCSSNSSSLGGGPLAPCSSRTRTP

SEQ ID NO: 438 - DNA, 3868 bp, Homo sapien
atgaacctctgaaaactgccggcatctgaggtttcctccaaggccctctgaagtgcagcccataatgaaggtcttggcggcaggagttgtgcccctgctgttggttctgcactggaaacatggggcggggagccccctccccatcacccctgtcaacgccacctgtgccatacgccacccatgtcacaacaacctcatgaaccagatcaggagccaactggcacagctcaatggcagtgccaatgccctctttattctctattacacagcccagggggagccgttccccaacaacctggacaagctatgtggccccaacgtgacggacttcccgcccttccacgccaacggcacggagaaggccaagctggtggagctgtaccgcatagtcgtgtaccttggcacctccctgggcaacatcacccgggaccagaagatcctcaaccccagtgccctcagcctccacagcaagctcaacgccaccgccgacatcctgcgaggcctccttagcaacgtgctgtgccgcctgtgcagcaagtaccacgtgggccatgtggacgtgacctacggccctgacacctcgggtaaggatgtcttccagaagaagaagctgggctgtcaactcctggggaagtataagcagatcatcgccgtgttggcccaggccttctagcaggaggtcttgaagtgtgctgtgaaccgagggatctcaggagttgggtccagatgtgggggcctgtccaagggtggctggggcccagggcatcgctaaacccaaatgggggctgctggcagaccccgagggtgcctggccagtccactccactctgggctgggctgtgatgaagctgagcagagtggaaacttccatagggagggagctagaagaaggtgccccttcctctgggagattgtggactggggagcgtgggctggacttctgcctctacttgtccctttggccccttgctcactttgtgcagtgaacaaactacacaagtcatctacaagagccctgaccacagggtgagacagcagggcccaggggagtggaccagcccccagcaaattatcaccatctgtgcctttgctgccccttaggttgggacttaggtgggccagaggggctaggatcccaaaggactccttgtcccctagaagtttgatgagtggaagatagagaggggcctctgggatggaaggctgtcttcttttgaggatgatcagagaacttgggcataggaacaatctggcagaagtttccagaaggaggtcacttggcattcaggctcttggggaggcagagaagccaccttcaggcctgggaaggaagacactgggaggaggagaggcctggaaagctttggtaggttcttcgttctcttccccgtgatcttccctgcagcctgggatggccagggtctgatggctggacctgcagcaggggtttgtggaggtgggtagggcaggggcaggttgctaagtcaggtgcagaggttctgagggacccaggctcttcctctgggtaaaggtctgtaagaaggggctggggtagctcagagtagcagctcacatctgaggccctgggaggtcttgtgaggtcacacagaggtacttgagggggactggaggccgtctctggtccccagggcaagggaacagcagaacttagggtcagggtctcagggaaccctgagctccaagcgtgctgtgcgtctgacctggcatgatttctatttattatgatatcctatttatattaacttattggtgctttcagtggccaagttaattcccctttccctggtccctactcaacaaaatatgatgatggctcccgacacaagcgccagggccagggcttagcagggcctggtctggaagtcgacaatgttacaagtggaataagcttacgggtgaagctcagagaagggtcggatctgagagaatggggaggcctgagtgggagtggggggccttgctccacccccatcccctactgtgacttgctttagcgtgtcagggtccaggctgcaggggctgggccaatttgtggagaggccgggtgcctttctgtcttgcttccagggggctggttcacactgttcttgggcgccccagcattgtgttgtgaggcgcactgttcctggcagatattgtgccccctggagcagtgggcaagacagtccttgtggcccaccctgtccttgtttctgtgtccccatgctgcctctgaaatagcgccctggaacaaccctgcccctgcacccagcatgctccgacacagcagggaagctcctcctgtggcccggacacccatagacggtgcggggggcctggctgggccagaccccaggaaggtggggtagactggggggatcagctgcccattgctcccaagaggaggagagggaggctgcagacgcctgggactcagaccaggaagctgtgggccctcctgctccacccccatcccactcccacccatgtctgggctcccaggcagggaacccgatctcttcctttgtgctggggccaggcgagtggagaaacgccctccagtctgagagcaggggagggaaggaggcagcagagttggggcagctgctcagagcagtgttctggcttcttctcaaaccctgagcgggctgccggcctccaagttcctccgacaagatgatggtactaattatggtacttttcactcactttgcacctttccctgtcgctctctaagcactttacctggatggcgcgtgggcagtgtgcaggcaggtcctgaggcctggggttggggtggagggtgcggcccggagttgtccatctgtccatcccaacagcaagacgaggatgtggctgttgagatgtgggccacactcacccttgtccaggatgcagggactgccttctccttcctgcttcatccggcttagcttggggctggctgcattcccccaggatgggcttcgagaaagacaaacttgtctggaaaccagagttgctgattccacccggggggcccggctgactcgcccatcacctcatctccctgtggacttgggagctctgtgccaggcccaccttgcggccctggctctgagtcgctctcccacccagcctggacttggccccatgggacccatcctcagtgctccctccagatcccgtccggcagcttggcgtccaccctgcacagcatcactgaatcacagagcctttgcgtgaaacagctctgccaggccgggagctgggtttctcttccctttttatctgctggtgtggaccacacctgggcctggccggaggaagagagagtttaccaagagagatgtctccgggcccttatttattatttaaacatttttttaaaaagcactgctagtttacttgtctctcctccccatcgtccccatcgtcctccttgtccctgacttggggcacttccaccctgacccagccagtccagctctgccttgccggctctccagagtagacatagtgtgtggggttggagctctggcacccggggaggtagcatttccctgcagatggtacagatgttcctgccttagagtcatctctagttccccacctcaatcccggcatccagccttcagtcccgcccacgtgctagctccgtgggcccaccgtgcggccttagaggtttccctccttcctttccactgaaaagcacatggccttgggtgacaaattcctctttgatgaatgtaccctgtggggatgtttcatactgacagattatttttatttattcaatgtcatatttaaaatatttattttttataccaaatgaatcacttttttttttaagaaaaaaaagagaaatgaataaagaatctactcttcg

SEQ ID NO: 439 - protein, 202 aa, Homo sapien
MKVLAAGVVPLLLVLHWKHGAGSPLPITPVNATCAIRHPCHNNLMNQIRSQLAQLNGSANALFILYYTAQGEPFPNNLDKLCGPNVTDFPPFHANGTEKAKLVELYRIVVYLGTSLGNITRDQKILNPSALSLHSKLNATADILRGLLSNVLCRLCSKYHVGHVDVTYGPDTSGKDVFQKKKLGCQLLGKYKQIIAVLAQAF

SEQ ID NO: 440 - DNA, 4607 bp, Homo sapien
gctggcggcggccgcccagggccggggccgcgcgcccagcctgagcccgccccgccgccgagcgtcaccgaacctgcttgaaatgcagccgaggagccggggcgggcggcagcggcggcggcggcggcggcgggggcagcggcaaccccggcgccgcggcaaggactcggagggctgagacgcggcggcggcggcgcggggagcgcggggcgcggcggccggagcccgggcccgccatgggcctccccgagccgggccctctccggcttctggcgctgctgctgctgctgctgctgctgctgctgctgcggctccagcatcttgcggcggcagcggctgatccgctgctcggcggccaagggccggccaaggagtgcgaaaaggaccaattccagtgccggaacgagcgctgcatcccctctgtgtggagatgcgacgaggacgatgactgcttagaccacagcgacgaggacgactgccccaagaagacctgtgcagacagtgacttcacctgtgacaacggccactgcatccacgaacggtggaagtgtgacggcgaggaggagtgtcctgatggctccgatgagtccgaggccacttgcaccaagcaggtgtgtcctgcagagaagctgagctgtggacccaccagccacaagtgtgtacctgcctcgtggcgctgcgacggggagaaggactgcgagggtggagcggatgaggccggctgtgctaccttgtgcgccccgcacgagttccagtgcggcaaccgctcgtgcctggccgccgtgttcgtgtgcgacggcgatgacgactgtggtgacggcagcgatgagcgcggctgtgcagacccggcctgcgggccccgcgagttccgctgcggcggcgatggcggcggcgcctgcatcccggagcgctgggtctgcgaccgccagtttgactgcgaggaccgctcggacgaggcagccgagctctgcggccgcccgggccccggggccacgtccgcgcccgccgcctgcgccaccgtctcccagttcgcctgccgcagcggcgagtgcgtgcacctgggctggcgctgcgacggcgaccgcgactgcaaagacaaatcggacgaggccgactgcccactgggcacctgccgtggggacgagttccagtgtggggatgggacatgtgtccttgcaatcaagcactgcaaccaggagcaggactgtccagatgggagtgatgaagctggctgcctacaggggctgaacgagtgtctgcacaacaatggcggctgctcacacatctgcactgacctcaagattggctttgaatgcacgtgcccagcaggcttccagctcctggaccagaagacctgtggcgacattgatgagtgcaaggacccagatgcctgcagccagatctgtgtcaattacaagggctattttaagtgtgagtgctaccctggctacgagatggacctactgaccaagaactgcaaggctgctggtggaaagagcccatccctaatcttcaccaaccggtacgaggtgcggaggatcgacctggtgaagcggaactattcacgcctcatccccatgctcaagaatgtcgtggcactagatgtggaagttgccaccaatcgcatctactggtgtgacctctcctaccgtaagatctatagcgcctacatggacaaggccagtgacccgaaagagcaggaggtcctcattgacgagcagttgcactctccagagggcctggcagtggactgggtccacaagcacatctactggactgactcgggcaataagaccatctcagtggccacagttgatggtggccgccgacgcactctcttcagccgtaacctcagtgaaccccgggccatcgctgttgaccccctgcgagggttcatgtattggtctgactggggggaccaggccaagattgagaaatctgggctcaacggtgtggaccggcaaacactggtgtcagacaatattgaatggcccaacggaatcaccctggatctgctgagccagcgcttgtactgggtagactccaagctacaccaactgtccagcattgacttcagtggaggcaacagaaagacgctgatctcctccactgacttcctgagccacccttttgggatagctgtgtttgaggacaaggtgttctggacagacctggagaacgaggccattttcagtgcaaatcggctcaatggcctggaaatctccatcctggctgagaacctcaacaacccacatgacattgtcatcttccatgagctgaagcagccaagagctccagatgcctgtgagctgagtgtccagcctaatggaggctgtgaatacctgtgccttcctgctcctcagatctccagccactctcccaagtacacatgtgcctgtcctgacacaatgtggctgggtccagacatgaagaggtgctaccgagcacctcaatctacctcaactacgacgttagcttctaccatgacgaggacagtacctgccaccacaagagcccccgggaccaccgtccacagatccacctaccagaaccacagcacagagacaccaagcctgacagctgcagtcccaagctcagttagtgtccccagggctcccagcatcagcccgtctaccctaagccctgcaaccagcaaccactcccagcactatgcaaatgaagacagtaagatgggctcaacagtcactgccgctgttatcgggatcatcgtgcccatagtggtgatagccctcctgtgcatgagtggatacctgatctggagaaactggaagcggaagaacaccaaaagcatgaattttgacaacccagtctacaggaaaacaacagaagaagaagatgaagatgagctccatatagggagaactgctcagattggccatgtctatcctgcagcaatcagcagctttgatcgcccactgtgggcagagccctgtcttggggagaccagagaaccggaagacccagcccctgccctcaaggagctttttgtcttgccgggggaaccaaggtcacagctgcaccaactcccgaagaaccctctttccgagctgcctgtcgtcaaatccaagcgagtggcattaagccttgaagatgatggactaccctgaggatgggatcacccccttcgtgcctcatggaattcagtcccatgcactacactctggatggtgtatgactggatgaatgggtttctatatatgggtctgtgtgagtgtatgtgtgtgtgtgattttttttttaaatttatgttgcggaaaggtaaccacaaagttatgatgaactgcaaacatccaaaggatgtgagagtttttctatgtataatgttttatacactttttaactggttgcactacccatgaggaattcgtggaatggctactgctgactaacatgatgcacataaccaaatgggggccaatggcacagtaccttactcatcatttaaaaactatatttacagaagatgtttggttgctgggggggcttttttgggttttggggcatttgttttttgtaaataagatgattatgctttgtggctatccatcaacataagtaaaaaaaaaaaaaaaacacttcaactccctcccccatttagattatttattaacatattttaaaaatcagatgagttctataaataatttagagaagtgagagtatttatttttggcatgtttggcccaccacacagactctgtgtgtgtatgtgtgtgtttatatgtgtatgtgtgtgacaggaaaatctgtagagaagaggcacatctatggctactgttcaaatacataaagataaatttattttcacacagtccacaaggggtatatcttgtagttttcagaaaagcctttggaaatctggatcaggaaatagataccatggtttgtgcaattatgtagtaaaaaaggcaaatcttttcacctctggctattcctgagaccccaggaagtcaggaaaagcctttcagctcacccatggctgctgtgactcctaccagggctttcttggctttggcgaaggtcagtgtacagacattccatggtaccagagtgctcagaaagtcaagataggatatgcctcaccctcagctactccttgttttaaagttcagctctttgagtaacttcttcaatttctttcaggacacttgggttgaattcagtaagtttcctctgaagcaccctgaagggtgccatccttacagagctaagtggagacgtttccagatcagcccaagtttactatagagactggcccaggcactgaatgtctaggacatgctgtggatgaagataaagatggtggaataggttttatcacatctcttatttctcttttccccttactctctaccatttcctttatgtggggaaacattttaaggtaataaataggttacttaccatcatatgttcatatagatgaaactaatttttggcttaagtcagaacaactggcccccaattgaagtcatatttgtggggggaaatggcatacgcaatattatattatattggatatttatgttcacacaggaatttggtttactgctttgtaaataaaagggaaaactccgggtatatgt

SEQ ID NO: 441 - protein, 963 aa, Homo sapien
MGLPEPGPLRLLALLLLLLLLLLLRLQHLAAAAADPLLGGQGPAKECEKDQFQCRNERCIPSVWRCDEDDDCLDHSDEDDCPKKTCADSDFTCDNGHCIHERWKCDGEEECPDGSDESEATCTKQVCPAEKLSCGPTSHKCVPASWRCDGEKDCEGGADEAGCATLCAPHEFQCGNRSCLAAVFVCDGDDDCGDGSDERGCADPACGPREFRCGGDGGGACIPERWVCDRQFDCEDRSDEAAELCGRPGPGATSAPAACATVSQFACRSGECVHLGWRCDGDRDCKDKSDEADCPLGTCRGDEFQCGDGTCVLAIKHCNQEQDCPDGSDEAGCLQGLNECLHNNGGCSHICTDLKIGFECTCPAGFQLLDQKTCGDIDECKDPDACSQICVNYKGYFKCECYPGYEMDLLTKNCKAAGGKSPSLIFTNRYEVRRIDLVKRNYSRLIPMLKNVVALDVEVATNRIYWCDLSYRKIYSAYMDKASDPKEQEVLIDEQLHSPEGLAVDWVHKHIYWTDSGNKTISVATVDGGRRRTLFSRNLSEPRAIAVDPLRGFMYWSDWGDQAKIEKSGLNGVDRQTLVSDNIEWPNGITLDLLSQRLYWVDSKLHQLSSIDFSGGNRKTLISSTDFLSHPFGIAVFEDKVFWTDLENEAIFSANRLNGLEISILAENLNNPHDIVIFHELKQPRAPDACELSVQPNGGCEYLCLPAPQISSHSPKYTCACPDTMWLGPDMKRCYRAPQSTSTTTLASTMTRTVPATTRAPGTTVHRSTYQNHSTETPSLTAAVPSSVSVPRAPSISPSTLSPATSNHSQHYANEDSKMGSTVTAAVIGIIVPIVVIALLCMSGYLIWRNWKRKNTKSMNFDNPVYRKTTEEEDEDELHIGRTAQIGHVYPAAISSFDRPLWAEPCLGETREPEDPAPALKELFVLPGEPRSQLHQLPKNPLSELPVVKSKRVALSLEDDGLP

SEQ ID NO: 442 - DNA, 2400 bp, Homo sapien
taggatggaaaggcagatgtaaagtccctcatggcgaaatataacacggggggcaacccgacagaggatgtctcagtcaatagccgacccttcagagtcacagggccaaactcatcttcaggaatacaagcaagaaagaacttattcaacaaccaaggaaatgccagccctcctgcaggacccagcaatgtacctaagtttgggtccccaaagccacctgtggcagtcaaaccttcttctgaggaaaagcctgacaaggaacccaagcccccgtttctaaagcccactggagcaggccaaagattcggaacaccagccagcttgaccaccagagaccccgaggcgaaagtgggatttctgaaacctgtaggccccaagcccatcaacttgcccaaagaagattccaaacctacatttccctggcctcctggaaacaagccatctcttcacagtgtaaaccaagaccatgacttaaagccactaggcccgaaatctgggcctactcctccaacctcagaaaatgaacagaagcaagcgtttcccaaattgactggggttaaagggaaatttatgtcagcatcacaagatcttgaacccaagcccctcttccccaaacccgcctttggccagaagccgcccctaagtaccgagaactcccatgaagacgaaagccccatgaagaatgtgtcttcatcaaaagggtccccagctcccctgggagtcaggtccaaaagcggccctttaaaaccagcaagggaagactcagaaaataaagaccatgcaggggagatttcaagtttgccctttcctggagtggttttgaaacctgctgcgagcaggggaggcctaggtctctccaaaaatggtgaagaaaaaaaggaagataggaagatagatgctgctaagaacaccttccagagcaaaataaatcaggaagagttggcctcagggactcctcctgccaggttccctaaggccccttctaagctgacagtgggggggccatggggccaaagtcaggaaaaggaaaagggagacaagaattcagccaccccgaaacagaagccattgcctcccttgtttaccttgggtccacctccaccaaaacccaacagaccaccaaatgttgacctgacgaaattccacaaaacctcttctggaaacagtactagcaaaggccagacgtcttactcaacaacttccctgccaccacctccaccatcccatccggccagccaaccaccattgccagcatctcacccatcacaaccaccagtcccaagcctacctcccagaaacattaaacctccgtttgacctaaaaagccctgtcaatgaagacaatcaagatggtgtcacgcactctgatggtgctggaaatctagatgaggaacaagacagtgaaggagaaacatatgaagacatagaagcatccaaagaaagagagaagaaaagggaaaaggaagaaaagaagaggttagagctggagaaaaaggaacagaaagagaaagaaaagaaagaacaagaaataaagaagaaatttaaactaacaggccctattcaagtcatccatcttgcaaaagcttgttgtgatgtcaaaggaggaaagaatgaactgagcttcaagcaaggagagcaaattgaaatcatccgcatcacagacaacccagaaggaaaatggttgggcagaacagcaaggggttcatatggctatattaaaacaactgctgtagagattgactatgattctttgaaactgaaaaaagactctcttggtgccccttcaagacctattgaagatgaccaagaagtatatgatgatgttgcagagcaggatgatattagcagccacagtcagagtggaagtggagggatattccctccaccaccagatgatgacatttatgatgggattgaagaggaagatgctgatgatggtttccctgctcctcctaaacaattggacatgggagatgaagtttacgatgatgtggatacctctgatttccctgtttcatcagcagagatgagtcaaggaactaattttggaaaagctaagacagaagaaaaggaccttaagaagctaaaaaagcaggaaaaagaagaaaaagacttcaggaaaaaatttaaatatgatggtgaaattagagtcctatattcaactaaagttacaacttccataacttctaaaaagtggggaaccagagatctacaggtaaaacctggtgaatctctagaagttatacaaaccacagatgacacaaaagttctctgcagaaatgaagaagggaaatatggttatgtccttcggagttacctagcggacaatgatggagagatctatgatgatattgctgatggctgcatctatgacaatgactagcactcaactttggtcatt

SEQ ID NO: 443 - protein, 783 aa, Homo sapien
MAKYNTGGNPTEDVSVNSRPFRVTGPNSSSGIQARKNLFNNQGNASPPAGPSNVPKFGSPKPPVAVKPSSEEKPDKEPKPPFLKPTGAGQRFGTPASLTTRDPEAKVGFLKPVGPKPINLPKEDSKPTFPWPPGNKPSLHSVNQDHDLKPLGPKSGPTPPTSENEQKQAFPKLTGVKGKFMSASQDLEPKPLFPKPAFGQKPPLSTENSHEDESPMKNVSSSKGSPAPLGVRSKSGPLKPAREDSENKDHAGEISSLPFPGVVLKPAASRGGLGLSKNGEEKKEDRKIDAAKNTFQSKINQEELASGTPPARFPKAPSKLTVGGPWGQSQEKEKGDKNSATPKQKPLPPLFTLGPPPPKPNRPPNVDLTKFHKTSSGNSTSKGQTSYSTTSLPPPPPSHPASQPPLPASHPSQPPVPSLPPRNIKPPFDLKSPVNEDNQDGVTHSDGAGNLDEEQDSEGETYEDIEASKEREKKREKEEKKRLELEKKEQKEKEKKEQEIKKKFKLTGPIQVIHLAKACCDVKGGKNELSFKQGEQIEIIRITDNPEGKWLGRTARGSYGYIKTTAVEIDYDSLKLKKDSLGAPSRPIEDDQEVYDDVAEQDDISSHSQSGSGGIFPPPPDDDIYDGIEEEDADDGFPAPPKQLDMGDEVYDDVDTSDFPVSSAEMSQGTNFGKAKTEEKDLKKLKKQEKEEKDFRKKFKYDGEIRVLYSTKVTTSITSKKWGTRDLQVKPGESLEVIQTTDDTKVLCRNEEGKYGYVLRSYLADNDGEIYDDIADGCIYDND

SEQ ID NO: 444 - DNA, 5681 bp, Homo sapien
  Unsure 3509-3812: Unknown base
  Unsure 5269-5591: Unknown base
cgggtagcgcgcctgggagggagaaagaagtcgggggccgtggcgcgcagcccgcggggcctgaagggatgttcgaggacaagccccacgctgagggggcggcggtggtcgccgcagccggggaggcgctacaggccctgtgccaggagctgaacctggacgaggggagcgcggccgaagccctggacgactttactgccatccgaggcaactacagcctagagggagaagttacacactggttggcatgttcattatatgttgcatgccgcaaaagcattattcccacggttggaaagggtatcatggaaggcaactgtgtttcacttaccagaatactacgttcagctaaattaagtttaatacaattttttagtaaaatgaagaaatggatggacatgtcaaatctaccacaagaatttcgtgaacgtatagaaaggctagagagaaattttgaggtgtctactgtaatattcaaaaaatatgagccaatttttttagatatatttcaaaatccatatgaagaaccaccaaagttaccacgaagccggaagcagaggaggattccttgcagtgttaaggatctgtttaatttctgttggacactttttgtttatactaagggtaattttcggatgattggggatgacttagtaaactcttatcatttacttctatgctgcttggatctgatttttgccaatgcgattatgtgcccaaatagacaagacttgctaaatccatcatttaaaggtttaccatctgattttcatactgctgactttacggcttctgaagagccaccctggcatcattgctgtactgtgtgaactgcatgatggacttctcgtagaagcaaaaggaataaaggagcactactttaagccatatatttcaaaactctttgacaggaagatattaaaaggagaatgcctcctggacctttcaagttttactgataatagcaaagcagtgaataaggagtatgaagagtatgttctaactgtggtgattttgatgagaggatcttttgggagcagacgcagaagaggaaatggaacacctcgaaagttcactcgtgacaccccattagggaaactgacagcacaggctaatgtggagtataaccttcaacagcactttgaaaaaaaaaggtcatttgcaccttctaccccactgaccggacggagatatttacgagaaaaagaagcagtcattactcctgttgcatcagccacccaaagtgtgagccggttacagagtattgtggctggtctgaaaaatgcaccaagtgaccaacttataaatatttttgaatcttgtgtgcgtaatcctgtggaaaacattatgaaaatactaaaaggaataggagagactttctgtcaacactatactcaatcaacagatgaacagccaggatctcacatagactttgctgtaaacagactaaagctggcagaaattttgtattataaaatactagagactgtaatggttcaggaaacacgaagacttcatggaatggacatgtcagttcttttagagcaagatatatttcatcgttccttgatggcttgttgtttggaaattgtgctctttgcctatagctcacctcgtacttttccttggattattgaagttctcaacttgcaaccattttacttttataaggttattgaggtggtgatccgctcagaagaggggctctcaagggacatggtgaaacacctaaacagcattgaagaacagattttggagagtttagcatggagtcacgattctgcactgtgggaggctctccaggtttctgcaaacaaagttcctacctgtgaagaagttatattcccaaataactttgaaacaggaaatggaggaaatgtgcagggacatcttcccctgatgccaatgtctcctctaatgcacccaagagtcaaggaagttcgaactgacagtgggagtcttcgaagagatatgcaaccattgtctccaatttctgtccatgaacgctacagttctcctaccgcagggagtgctaagagaagactctttggagaggaccccccaaaggaaatgcttatggacaagatcataacagaaggaacaaaattgaaaatcgctccttcttcaagcattactgctgaaaatgtatcaattttacctggtcaaactcttctaacaatggccacagccccagtaacaggaacaacaggacataaagttacaattccattacatggtgtcgcaaatgatgctggagagatcacactgatacctctttccatgaatacaaatcaggagtccaaagtcaagagtcctgtatcacttactgctcattcattaattggtgcttctccaaaacagaccaatctgactaaagcacaagaggtacattcaactggaataaacaggccaaagagaactgggtccttagcactattttacagaaaggtctatcatttggcaagtgtacgcttacgtgatctatgtctaaaactggatgtttcaaatgagttacgaaggaagatatggacgtgttttgaattcactttagttcactgtcctgatctaatgaaagacaggcatttggatcagctcctcctttgtgccttttatatcatggcaaaggtaacaaaagaagaaagaacttttcaagaaattatgaaaagttataggaatcagccccaagctaatagtcacgtatatagaagtgttctgctgaaaagtattccaagagaagttgtggcatataataaaaatataaatgatgactttgaaatgatagattgtgacttagaagatgctacaaaaacacctgactgttccagtggaccagtgaaagaggaaagaggtgatcttataaaattttacaatacaatatatgtaggaagagtgaagtcatttgcactgaaatacgacttggcgaatcaggaccatatgatggatgctccaccactctctccttttccacatattaaacaacagccaggctcaccacgccgcatttcccagcagcactccatttatatttccccgcacaagaatgggtcaggccttacaccaagaagcgctctgctgtacaagttcaatggcagcccttctaagagtttgaaagatatcaacaacatgataaggcaaggtgagcagagaaccaagaagcgagtaatagccatcgatagtgatgcagaatcccctgccaaacgcgtctgtcaagaaaatgatgacgttttactgaaacgactacaggatgttgtcagtgaaagagcaaatcattaatgttgttcttgtttctatgataaaagcactttcagattgttctgcagaaagttggagctctgtccttcaaaccttttagccctatagatgataaatatcactgggttataagaaaaaattgcacaaaaattatgtgctttttaaaatatttatccaaaatgtagttgacagagatgtattttgagttggattggaaaggaatattttaagtgccttttaaaaatactaatagtccnnnnnnnnnnnnnnnnnnnnnnnnnnnnnnnnnnnnnnnnnnnnnnnnnnnnnnnnnnnnnnnnnnnnnnnnnnnnnnnnnnnnnnnnnnnnnnnnnnnnnnnnnnnnnnnnnnnnnnnnnnnnnnnnnnnnnnnnnnnnnnnnnnnnnnnnnnnnnnnnnnnnnnnnnnnnnnnnnnnnnnnnnnnnnnnnnnnnnnnnnnnnnnnnnnnnnnnnnnnnnnnnnnnnnnnnnnnnnnnnnnnnnnnnnnnnnnnnnnnnnnnnnnnnnnnnnnnnnnnnnnnnnnnnnnnnnnnnnnnnnnnngggaattttttttaatgtttgctccttgagttttcaagatgaaataaggagaaaccccataactttttagctctcttttaaaaataaatgtctccttctgtgttctgtaatatgaggataaataatctacttttgatagcatgctttgagatatttgtattcttaatttaatattgaaggaaggggttggttcccatagtacctggccagagggttatataccatcctgtctctggcccactgtggtaattccacatccaggtaccaccgccattcagagttgtctcaccccttctcgtgccttttctctccttgagctttataaacagatttgtacctgagccccagtgctacactcatccttgctttccagccctaagccatctcagcctgatgtcacaacccaataaatggggcactttcttcttttgtaaactattatcattttggtttctgtgacattaacttaattatatatgatcgtattaactcatgtagttctcaaaataggcagctgcttctgaagccagtaaaataaaattcagttagttattaaaaactaaattcctattagtaaggtaacaccatgattatgtgtgatatactgtttttgagatcatagttatcagtcattctcaatatctaattgagtccctaagaatattttaaaccttttaaaaatcacataaatatcatctcatgcctcataattctaatatatttaatacatcagtaaaatagctgcttattacttcccacactttgttctcagtattgttagtgcatcatgagtttcctgctagtgtttgaccactgggtactcctgaagatgttttttagtactagggatgcttttcagtattagggatgcttttttcagtactagggatgtactagggagtactgagtactcctgaagatgtttttcagtactagggatgcttttttcagtgttagggatgcttttcagtactagggatgcttttttcagtgctagggatgcttttcagtactagggatgctttccaaaatatcacctctttaacgtttactttttctagtgtgtgtctggaatccaaaggacatgaataagccactcataattaattttgagaagttttatcaaatgtttatgtttctaactgcaaaccttaattttggaaaggcacaatgtttaactcacctatgtttaaccatggctaatttaaaatagtctaagatttggccgtcactaattagtattctcaagaatttcatttttcaattttaagaagaaaagggattttggtcacattttgcttgtaaatgaaaattacatcctcattctttgtgtagtatctacacattgttataagccaaaaaacaaagtctgtctggaatctttgtacatatttgtatgttgctataattgttatttttatcttcattattgtgcaaaatataaatgagcatttgtnnnnnnnnnnnnnnnnnnnnnnnnnnnnnnnnnnnnnnnnnnnnnnnnnnnnnnnnnnnnnnnnnnnnnnnnnnnnnnnnnnnnnnnnnnnnnnnnnnnnnnnnnnnnnnnnnnnnnnnnnnnnnnnnnnnnnnnnnnnnnnnnnnnnnnnnnnnnnnnnnnnnnnnnnnnnnnnnnnnnnnnnnnnnnnnnnnnnnnnnnnnnnnnnnnnnnnnnnnnnnnnnnnnnnnnnnnnnnnnnnnnnnnnnnnnnnnnnnnnnnnnnnnnnnnnnnnnnnnnnnnnnnnnnnnnnnnnnnnnnnnnnnnnnnnnnnnnnnnnnnnnttctggacatgtttttatcagttttcaggacttggtatcaatgtacatagaatggctaataaaaattggaattgagattattgaaaaaaa

SEQ ID NO: 445 - protein, 1090 aa, Homo sapien
GSAPGREKEVGGRGAQPAGPEGMFEDKPHAEGAAVVAAAGEALQALCQELNLDEGSAAEALDDFTAIRGNYSLEGEVTHWLACSLYVACRKSIIPTVGKGIMEGNCVSLTRILRSAKLSLIQFFSKMKKWMDMSNLPQEFRERIERLERNFEVSTVIFKKYEPIFLDIFQNPYEEPPKLPRSRKQRRIPCSVKDLFNFCWTLFVYTKGNFRMIGDDLVNSYHLLLCCLDLIFANAIMCPNRQDLLNIHHLKVYHLIFILLTLRLLKSHPGIIAVLCELHDGLLVEAKGIKEHYFKPYISKLFDRKILKGECLLDLSSFTDNSKAVNKEYEEYVLTVVILMRGSFGSRRRRGNGTPRKFTRDTPLGKLTAQANVEYNLQQHFEKKRSFAPSTPLTGRRYLREKEAVITPVASATQSVSRLQSIVAGLKNAPSDQLINIFESCVRNPVENIMKILKGIGETFCQHYTQSTDEQPGSHIDFAVNRLKLAEILYYKILETVMVQETRRLHGMDMSVLLEQDIFHRSLMACCLEIVLFAYSSPRTFPWIIEVLNLQPFYFYKVIEVVIRSEEGLSRDMVKHLNSIEEQILESLAWSHDSALWEALQVSANKVPTCEEVIFPNNFETGNGGNVQGHLPLMPMSPLMHPRVKEVRTDSGSLRRDMQPLSPISVHERYSSPTAGSAKRRLFGEDPPKEMLMDKIITEGTKLKIAPSSSITAENVSILPGQTLLTMATAPVTGTTGHKVTIPLHGVANDAGEITLIPLSMNTNQESKVKSPVSLTAHSLIGASPKQTNLTKAQEVHSTGINRPKRTGSLALFYRKVYHLASVRLRDLCLKLDVSNELRRKIWTCFEFTLVHCPDLMKDRHLDQLLLCAFYIMAKVTKEERTFQEIMKSYRNQPQANSHVYRSVLLKSIPREVVAYNKNINDDFEMIDCDLEDATKTPDCSSGPVKEERGDLIKFYNTIYVGRVKSFALKYDLANQDHMMDAPPLSPFPHIKQQPGSPRRISQQHSIYISPHKNGSGLTPRSALLYKFNGSPSKSLKDINNMIRQGEQRTKKRVIAIDSDAESPAKRVCQENDDVLLKRLQDVVSERANH

SEQ ID NO: 446 - DNA, 2042 bp, Homo sapien
ggggccagtcgttcgccggaaagcatttgtctcccacctcatcataacaacaattaatttcctctggggcctgaggagggcagaatttcaaccttcggtgtgcttgggagtggcgattgtgatttacacgacaaaatgccgaggtgctcggtggagtcatggcagtgccctttgtggaagactgggacttggtgcaaaccctgggagaaggtgcctatggagaagttcaacttgctgtgaatagagtaactgaagaagcagtcgcagtgaagattgtagatatgaagcgtgccgtagactgtccagaaaatattaagaaagagatctgtatcaataaaatgctaaatcatgaaaatgtagtaaaattctatggtcacaggagagaaggcaatatccaatatttatttctggagtactgtagtggaggagagctttttgacagaatagagccagacataggcatgcctgaaccagatgctcagagattcttccatcaactcatggcaggggtggtttatctgcatggtattggaataactcacagggatattaaaccagaaaatcttctgttggatgaaagggataacctcaaaatctcagactttggcttggcaacagtatttcggtataataatcgtgagcgtttgttgaacaagatgtgtggtactttaccatatgttgctccagaacttctgaagagaagagaatttcatgcagaaccagttgatgtttggtcctgtggaatagtacttactgcaatgctcgctggagaattgccatgggaccaacccagtgacagctgtcaggagtattctgactggaaagaaaaaaaaacatacctcaacccttggaaaaaaatcgattctgctcctctagctctgctgcataaaatcttagttgagaatccatcagcaagaattaccattccagacatcaaaaaagatagatggtacaacaaacccctcaagaaaggggcaaaaaggccccgagtcacttcaggtggtgtgtcagagtctcccagtggattttctaagcacattcaatccaatttggacttctctccagtaaacagtgcttctagtgaagaaaatgtgaagtactccagttctcagccagaaccccgcacaggtctttccttatgggataccagcccctcatacattgataaattggtacaagggatcagcttttcccagcccacatgtcctgatcatatgcttttgaatagtcagttacttggcaccccaggatcctcacagaacccctggcagcggttggtcaaaagaatgacacgattctttaccaaattggatgcagacaaatcttatcaatgcctgaaagagacttgtgagaagttgggctatcaatggaagaaaagttgtatgaatcaggttactatatcaacaactgataggagaaacaataaactcattttcaaagtgaatttgttagaaatggatgataaaatattggttgacttccggctttctaagggtgatggattggagttcaagagacacttcctgaagattaaagggaagctgattgatattgtgagcagccagaaggtttggcttcctgccacatgatcggaccatcggctctggggaatcctggtgaatatagtgctgctatgttgacattattcttcctagagaagattatcctgtcctgcaaactgcaaatagtagttcctgaagtgttcacttccctgtttatccaaacatcttccaatttattttgtttgttcggcatacaaataatacctatatcttaattgtaagcaaaactttggggaaaggatgaatagaattcatttgattatttcttcatgtgtgtttagtatctgaatttgaaactcatctggtggaaaccaagtttcaggggacatgagttttccagcttttatacacacgtatctcatttttatcaaaacattttgtttaattcaaaaagtacatatttcttccatgttgatttaattctaagatgaaccaataaagacataattcttgcaaaaaaaaaaaaaaaaaaaaaaaaaa

SEQ ID NO: 447 - protein, 476 aa, Homo sapien
MAVPFVEDWDLVQTLGEGAYGEVQLAVNRVTEEAVAVKIVDMKRAVDCPENIKKEICINKMLNHENVVKFYGHRREGNIQYLFLEYCSGGELFDRIEPDIGMPEPDAQRFFHQLMAGVVYLHGIGITHRDIKPENLLLDERDNLKISDFGLATVFRYNNRERLLNKMCGTLPYVAPELLKRREFHAEPVDVWSCGIVLTAMLAGELPWDQPSDSCQEYSDWKEKKTYLNPWKKIDSAPLALLHKILVENPSARITIPDIKKDRWYNKPLKKGAKRPRVTSGGVSESPSGFSKHIQSNLDFSPVNSASSEENVKYSSSQPEPRTGLSLWDTSPSYIDKLVQGISFSQPTCPDHMLLNSQLLGTPGSSQNPWQRLVKRMTRFFTKLDADKSYQCLKETCEKLGYQWKKSCMNQVTISTTDRRNNKLIFKVNLLEMDDKILVDFRLSKGDGLEFKRHFLKIKGKLIDIVSSQKVWLPAT

SEQ ID NO: 448 - DNA, 2042 bp, Homo sapien; identical to SEQ ID NO: 446

SEQ ID NO: 449 - protein, 476 aa, Homo sapien; identical to SEQ ID NO: 447

SEQ ID NO: 450 - DNA, 1461 bp, Homo sapien
tttaaggcgccgggtttccggggctcctggccccgcttattccgcgggggtcggcggggtcggcctgggcgcccgcgccgccgctgcgctttgtccgctgggcacactgcttctgggaggggcgggcagacatggtggcggccgccgccccctcctcggccctagcatgccgcggccgcctcgcggctacccggcttgccggtcccgagcggcagccccggggtggcgatggggtcgcgccgaggcagcggaggttctgcgggcgactggaggttggcagtgggcgggagaaagaggaaggcaggcgcggctgggcctcggcctctggcgccgcggtaccctttgtctcggcagcctgacggccccgccgggctctccggagaggggaacgggcggcgagggtggcgggtcctgggcgccctgtgctgcggggccgagaggcgctcgggtcgcggcgggaccggccggaccagacagggttaatggaagagcctggccagtcccgcgcggggcccccgcagcgacagccttggccgcggggactggagtcctgagggggagaagcctgccgttctgaaggctcgggacttctgccccaaagacttcgccgccgagaactgcgggtgcactgcctcagggaagaagttgagaattttgccaggtcatctctgccagggcacagttcatcactgtgtgtttagtgtgtttcggtgaagctctccaagtgtgttgaatcagcgtgcctagcctcaagggtgcatcgtgaaaactgaaaccaaaggaatgatacaggcctgctttgtgtgtgtcttcccactttaagcttgttttcagtacaaatactcttgctttaaacctgattggactgtggcgagcggacatctgttcaaaggaggggccgagaccacagtacttctgaagggggcttgataatgtggaaacattttaagttttctctccggactgttttgctctctcaattcaggcaagttactgaagtacgttttttatctagaaaaaggtttgatgtagtctgtaaatggtccttgtaaagtacattgccatctcagaattaaaagatccactctcatttattatgcagaagttagtggtcattctttcctgtagatagtttatctcatgtaaagacccacccagcttggtttaaatttttttctcactgacgtataaccatcagctttgatacttccattttcaggctcagactttgaatttaaggaaactaaagatgactttattttcttttctcttggtttttttttccaaaaacaaaaaataaatccattacatgttaacatagatgataagagtgacatcttgcatttttgcaaatctttttaatgcctggtttaatagaagattctcagatctacgtcagactgttgtggttagcacaccatgtaacctctggaacactccactgtacactcatactttttt

SEQ ID NO: 451 - protein, 136 aa, Homo sapien
MPRPPRGYPACRSRAAAPGWRWGRAEAAEVLRATGGWQWAGERGRQARLGLGLWRRGTLCLGSLTAPPGSPERGTGGEGGGSWAPCAAGPRGARVAAGPAGPDRVNGRAWPVPRGAPAATALAAGTGVLRGRSLPF

SEQ ID NO: 452 - DNA, 2201 bp, Homo sapien
atcctgttgtgcctatcacctgttgaagttgccagtcttaaggaagggatcaatttctttcgcaataagagcactggcaaagactacgtcttgtacaagaataagagccgactgagggcatgcaagaatatgtgcaagcaccaaggaggcctgttcataaaagatatcgaggatttagccggaagttgttgaaatggatgaaaacaacggacttttgcttttagaactgaatcctcctaacccttgggacttacagcccagatctcctgaagagttggcttttggagaagtacagataacatatctcactcatgcctgcatggacctcaagttaggagacaagagaatggtgtttgacccttggttaatcggtcctgcttttgcccgtggatggtggttgctccatgagcctccatctgattggctggagaggctgtgccaggcagacctcgtttacatcagtcatctgcactcagaccacctgagttaccccacactgaaaaagcttgctgggagaagaccagatattcccatttatgttggaaacacagaaaggcctgtattttggaatctgaatcagagcggtgtccagttgactaatatcaatgtcgtgccatttggaatatggcagcaggtggacaaaaatcttcgattcatgatcttgatggatggtgttcatcctgagatggacacttgcattattgtggagtacaaaggtcataaaatactcaatacagtagactgcaccagacccaatgggggaaggctgcctatgaaggttgctctaatgatgagtgattttgctggaggagcatcaggctttccaatgactttcagtggtggaaaatttacggaggaatggaaagcccaattcattaaaacagaaaggaagaagctcctgaactacaaggcttggctggtgaagaacctgcaaccccgaatttattgtccctttgctgggtattttgtggaatctcacccatcagacaagtacatcaaggaaacaaacaccaaaaatgacccaaatgaactcaacaatcttatcaagaaaaactctgatgtgataacatggacccctcgaccgggagccacccttgatctgggaagaatgctgaaggatccaacagacagcaagggcatcatagagcctccagaggggacaaaaatttacaaggattcctgggattttgaaccttatttggaaatcttgaatgctgctctaggagatgaaatatttcttcactcatcctggataaaagaatacttcacttgggctggatttaaagattacaaccttgtggtcaggatgattgagacagatgaggacttcaatccttttcctggaggatatgactatttggttgactttttagatttatccttcccaaaagaaagaccacaacgagaacatccctatgaggaaatccatagccgggtggatgtcatcagacacgtggtgaagaatggtctactctgggatgagttgtatataggattccaaacacggctccagcgggatcctgacatataccatcacctgttttggaatcattttcaaataaaactccccctcacaccacccaactggaagtcattcctgatgtgctgtgagcagaatgggcctgcgattttgcaagaatgcaaaaccacatgaaaatttcaagaattcactgatctgatgcaaaataaaaatttatcattacatcttgaacccaggaagcttacagcaaagagactatgctttatgacgtcagcaatagataattccacgttgcctttgtgatttgtatatatagcttacatttgtggaccactacatagccagattcaaaaatattttacttgttccatccacagttctctacagaaagaaccaatgaacccaataggaacaaattctctgtggaaaacaaagcatagctgtagtagatacgaatccaatcacagaggaaacaggaagagaaaaacatccaagactacagtgaaaactggaaatggtctgttttcgtgatattcgtatgattaagatgcaaattttttcttaggaaaatgtgattgttaactagcattctgttttacatgttgacatttctaacacacacaccactgatttgaacttcaaaatttattttctgattatatatgctaggtctgattctgaagatacaagaattcaatggtggaatttgtctcctgaaatt

SEQ ID NO: 453 - protein, 486 aa, Homo sapien
MDENNGLLLLELNPPNPWDLQPRSPEELAFGEVQITYLTHACMDLKLGDKRMVFDPWLIGPAFARGWWLLHEPPSDWLERLCQADLVYISHLHSDHLSYPTLKKLAGRRPDIPIYVGNTERPVFWNLNQSGVQLTNINVVPFGIWQQVDKNLRFMILMDGVHPEMDTCIIVEYKGHKILNTVDCTRPNGGRLPMKVALMMSDFAGGASGFPMTFSGGKFTEEWKAQFIKTERKKLLNYKAWLVKNLQPRIYCPFAGYFVESHPSDKYIKETNTKNDPNELNNLIKKNSDVITWTPRPGATLDLGRMLKDPTDSKGIIEPPEGTKIYKDSWDFEPYLEILNAALGDEIFLHSSWIKEYFTWAGFKDYNLVVRMIETDEDFNPFPGGYDYLVDFLDLSFPKERPQREHPYEEIHSRVDVIRHVVKNGLLWDELYIGFQTRLQRDPDIYHHLFWNHFQIKLPLTPPNWKSFLMCCEQNGPAILQECKTT

SEQ ID NO: 454 - DNA, 2525 bp, Homo sapien
agccggccgctaagaagccgaaagatgtccaggtcgggcgcggcggctgagaaggcggactccagacagcgaccccagatgaaggtaaatgaatataaagaaaatcaaaacatcgcttatgtgtctctgagaccagcacagactacagttttaataaaaacagctaaggtctatcttgcccccttttcactcagtaattaccagctagaccagcttatgtgccccaaatccctatcagaaaagaattctaacaatgaagtggcgtgtaagaagactaaaataaagaaaacttgcagaaggattatacctccaaagatgaaaaacacatcttccaaggcagaatccacgctgcaaaattcatcctcagctgttcatactgaaagtaacaagctacaacccaagagaacggcagatgcgatgaatctcagtgttgatgtggaaagtagtcaggatggagacagtgatgaagataccacaccagccctggatttttcgggattgtcaccctacgaaaggaagagactgaagaacatatcagaaaacgcagacttttttgcttctcttcagttgtctgagtctgctgcaagactccgtgaaatgatagagaagagacagcctcctaaatccaaaagaaagaagcctaagagagaaaatgggattggatgtagaaggtcaatgcgattactaaaagttgatccttcgggagtttcattaccagcagctccaacaccgccgacattagtagcagatgaaactcctttgttacctcctgggcctttagaaatgacttctgaaaatcaagaagacaacaatgaacgatttaaaggatttctgcacacatgggcaggaatgagcaagccaagtagtaagaacactgagaagggattatctagcattaaaagctacaaagccaatttaaatggcatggtcattagtgaagataccgtttacaaagttaccacaggcccaatattctctatggctctccatccatcagaaactagaactttggtagcagttggggccaaatttgggcaagttggactttgtgatttgacccagcaacctaaagaagatggagtttatgtttttcacccccatagtcagccagttagctgtctttacttctcacccgccaatccggcccacatactgtcactgagctatgatggcacgttacgctgtggggatttttccagggctatttttgaagaggtgtatagaaatgaaagaagtagcttttcctccttcgacttcttggcagaagatgcctccactttaatagtaggacactgggatggaaatatgtcactggtggatagacggacacctggaacttcttatgagaaacttaccagttcttctatgggaaaaataagaactgttcatgtccacccagtgcatagacagtattttatcactgccggattgagggatactcatatttatgatgcaaggcgattgaattccaggagaagtcagcctttgatttctttgactgaacatacaaagagcattgcttccgcctatttttcacctcttactggtaacagagtggtgaccacatgtgctgattgtaatctgagaatttttgacagcagctgtatatcttctaagattccgctcctcaccaccatcaggcacaacactttcactgggcgatggctgaccaggttccaagccatgtgggatcctaaacaagaagactgtgtcatagttggcagcatggcccatccacgacgggtagaaatcttccatgagacaggaaagagggtgcattcgtttggtggagaataccttgtctctgtgtgttccatcaatgccatgcacccaactcggtatattttggctggaggtaattccagcgggaagatacatgtttttatgaatgaaaaaagctgctgagtttttggtttaggaacatcaatttgttcaaattgaccactgtctaaggagcctagtaatcggcgtgccttagtgtgtttatgtggtaatgtgttacatttagcaattataacattgttttattaataagactataagaagagtgtacttttagtaagggagaagtcttggagggttgcttctgcaggacggggagggaatttgaggggaggctgaggtgccgtcaggactttttttttttttttttttttgagatggagttttgctcttgttgcccaggctggagtgcaatagcgcgatcttggctcaccgcaacctccgcctcccaggttcaagcgattctcctgcctcagactcctaagtagctgggattacaggcacctgccaccacgcctggctatttttttgtatttttagtagagatggggtttcatcatgttggccaggctggtctcgagctcctgacctcaggtgatctgcccgcctcggcctccaaaagtgctggaattacaggcgtgagccaccatgcctggccatcagaacttgtaatcaagacagtatgttgagaaattctaacattataaattacaaagctttgactattaaagtttttgtgatct

SEQ ID NO: 455 - protein, 626 aa, Homo sapien
MSRSGAAAEKADSRQRPQMKVNEYKENQNIAYVSLRPAQTTVLIKTAKVYLAPFSLSNYQLDQLMCPKSLSEKNSNNEVACKKTKIKKTCRRIIPPKMKNTSSKAESTLQNSSSAVHTESNKLQPKRTADAMNLSVDVESSQDGDSDEDTTPALDFSGLSPYERKRLKNISENADFFASLQLSESAARLREMIEKRQPPKSKRKKPKRENGIGCRRSMRLLKVDPSGVSLPAAPTPPTLVADETPLLPPGPLEMTSENQEDNNERFKGFLHTWAGMSKPSSKNTEKGLSSIKSYKANLNGMVISEDTVYKVTTGPIFSMALHPSETRTLVAVGAKFGQVGLCDLTQQPKEDGVYVFHPHSQPVSCLYFSPANPAHILSLSYDGTLRCGDFSRAIFEEVYRNERSSFSSFDFLAEDASTLIVGHWDGNMSLVDRRTPGTSYEKLTSSSMGKIRTVHVHPVHRQYFITAGLRDTHIYDARRLNSRRSQPLISLTEHTKSIASAYFSPLTGNRVVTTCADCNLRIFDSSCISSKIPLLTTIRHNTFTGRWLTRFQAMWDPKQEDCVIVGSMAHPRRVEIFHETGKRVHSFGGEYLVSVCSINAMHPTRYILAGGNSSGKIHVFMNEKSC

SEQ ID NO: 456 - DNA, 3472 bp, Homo sapien
tggcggccgccggcgtcgccgccatggacctaggacccttgaacatctgtgaagaaatgactattctgcatggaggcttcttgctggccgagcagctgttccaccctaaggcactggcagaattaacaaagtctgactgggaacgtgttggacggcccatcgtggaggccttaagggagatctcctcggctgcagcacactcccagccctttgcctggaagaagaaagccctgatcatcatctgggccaaggttctgcagccgcaccccgtgaccccgtccgacacagagacacggtggcaggaagacctgttcttctcggtgggcaacatgatccccaccatcaaccacaccatcctcttcgagctgctcaaatccctggaagcttctggactctttatccagctcctgatggccctgcccaccaccatctgccatgcagaactagagcgctttctggaacatgtgaccgttgacacttctgccgaagacgtggccttcttcctggacatctggtgggaggtgatgaagcacaagggtcacccgcaggaccccctgctctcccagtttagtgcaatggcccataagtacctgcctgccttagatgagttcccccatcctccaaagaggcttaggtcagacccagacgcgtgccccaccatgcccctgttggccatgctgctccgcgggctgacacagatccagagtcggatcctgggcccggggaggaagtgctgtgcgctggccaacctggctgacatgctgactgtgtttgcgctgacagaggacgacccccaggaggtgtctgcaaccgtgtatctggacaaactggccacggtgatctctgtgtggaactcggacacccagaatccctaccaccagcaggcgctggcagagaaggtgaaggaggcagaacgggatgtcagcctgacctcgctggccaaactccccagtgagaccattttcgtgggctgcgagttcctgcaccacctgctgcgggagtggggggaggagttgcaggccgtgctccgcagcagccaggggacaagttacgacagctaccggctgtgcgacagtctgacttccttcagccagaacgcgacgctctacctgaaccgcaccagcctgtccaaggaggacaggcaggtggtctctgagctggcggagtgtgtcagggacttcctgaggaaaacgagcacggtgctgaagaacagggccttggaggatatcacagcttccattgccatggccgtcatccagcagaagatggaccgccatatggaagtgtgctacatttttgcctctgagaagaagtgggccttctcggacgagtgggtagcctgcctggggagtaacagggccctcttccgagagccagacttggtgttgaggctgctggaaacagtgatagacgtcagcacagctgacagagccatccctgagtctcagatccggcaggtgatccacctgatcctggaatgttacgcagacctctccctgccaggtaaaaataaagtccttgcaggtatcctgcgttcctgggggcgaaagggcctctctgaaaagttgctggcttatgtggagggttttcaggaagacctcaatacaacttttaaccagctcactcagagtgcctccgaacagggcttggcaaaagctgtggcctccgtggcccgcctggtcatagtgcacccggaagtcacggtgaagaaaatgtgcagcctggctgtggtcaatctcggcacccacaagttcctggcccagattctcactgccttccctgcccttaggtttgtggaagtgcagggtcccaattcatctgccactttcatggtgtcatgcctcaaagaaaccgtctggatgaagttctctacacccaaggaagaaaagcaatttttagagctcctgaactgcctgatgagtcccgtgaaaccccaagggattccagtggctgctcttcttgagccagacgaggtgctgaaggaatttgtcctgcctttcttgaggttagatgttgaagaggtagacctcagtctgaggatcttcatccagactctagaggcaaacgcgtgccgagaggaatactggctccagacctgctccccgtttccactcctcttcagcttgtgccagctcttggaccgctttagcaaatactggccgcttcccaaggagaagcggtgcctctctttggataggaaggatctagcgatccatatcctggagctcctgtgtgagattgtatcagccaatgctgagaccttctccccggatgtctggatcaagtccctgtcctggctccaccgcaagttagaacagctagactggactgtgggcctgaggctgaagagcttcttcgaggggcacttcaagtgtgaagtgccagccacactttttgagatctgtaagctttcagaagacgagtggacctcccaggcccacccagggtacggggctggcacggggctcctggcctggatggagtgctgctgcgtctccagcggcatctcggagaggatgctgtctctcttggtggtggacgtgggcaatcctgaggaggtcagactgttcagcaaaggctttctggtggccctggtgcaagtcatgccttggtgcagccctcaggagtggcagcgccttcaccagctgaccaggagactgctggagaagcagctcctccatgtcccttatagcctggaatatattcagtttgttcccctgctcaacctgaagccctttgcccaggagttgcaactctccgtcctcttcctgaggactttccagtttctctgcagccatagctgtcgtaattggcttcctctggaaggctggaaccacgtggtcaaactcctctgtggcagtctgacccgcctcctggactcagtcagggcgatacaggcagctggcccttgggttcaaggaccagagcaggacctgacccaggaagccctgtttgtttacacccaggtgttctgccatgctctgcacatcatggccatgctccacccggaggtctgtgagccactctacgttttagccttggaaaccctcacctgctatgagactttgagcaagaccaacccttctgtcagctccttgctccagagggcacacgagcagcgcttcttaaagtccattgctgagggcattggccctgaagaacggcgccaaaccctgttgcagaagatgagcagcttctgacttggcgtggggagctgggccccaacatggcgggtctgcagaagatcagcagcttcttacctgtgcgggagcgaaaaagctgggcttcaacatggcaggtctgtaggggtcagacccgagcagcctggactttacagttatgtgaaactgtccacaaaaagtcatggcaataatggtgtaaagaaaatagtttcttgggtatttgtaacgtacaaactatcataaaaattctcctctttcgcatctcaaaaaaaaaaaaaaaaaaaaaaaaa

SEQ ID NO: 457 - protein, 1058 aa, Homo sapien
MDLGPLNICEEMTILHGGFLLAEQLFHPKALAELTKSDWERVGRPIVEALREISSAAAHSQPFAWKKKALIIIWAKVLQPHPVTPSDTETRWQEDLFFSVGNMIPTINHTILFELLKSLEASGLFIQLLMALPTTICHAELERFLEHVTVDTSAEDVAFFLDIWWEVMKHKGHPQDPLLSQFSAMAHKYLPALDEFPHPPKRLRSDPDACPTMPLLAMLLRGLTQIQSRILGPGRKCCALANLADMLTVFALTEDDPQEVSATVYLDKLATVISVWNSDTQNPYHQQALAEKVKEAERDVSLTSLAKLPSETIFVGCEFLHHLLREWGEELQAVLRSSQGTSYDSYRLCDSLTSFSQNATLYLNRTSLSKEDRQVVSELAECVRDFLRKTSTVLKNRALEDITASIAMAVIQQKMDRHMEVCYIFASEKKWAFSDEWVACLGSNRALFREPDLVLRLLETVIDVSTADRAIPESQIRQVIHLILECYADLSLPGKNKVLAGILRSWGRKGLSEKLLAYVEGFQEDLNTTFNQLTQSASEQGLAKAVASVARLVIVHPEVTVKKMCSLAVVNLGTHKFLAQILTAFPALRFVEVQGPNSSATFMVSCLKETVWMKFSTPKEEKQFLELLNCLMSPVKPQGIPVAALLEPDEVLKEFVLPFLRLDVEEVDLSLRIFIQTLEANACREEYWLQTCSPFPLLFSLCQLLDRFSKYWPLPKEKRCLSLDRKDLAIHILELLCEIVSANAETFSPDVWIKSLSWLHRKLEQLDWTVGLRLKSFFEGHFKCEVPATLFEICKLSEDEWTSQAHPGYGAGTGLLAWMECCCVSSGISERMLSLLVVDVGNPEEVRLFSKGFLVALVQVMPWCSPQEWQRLHQLTRRLLEKQLLHVPYSLEYIQFVPLLNLKPFAQELQLSVLFLRTFQFLCSHSCRNWLPLEGWNHVVKLLCGSLTRLLDSVRAIQAAGPWVQGPEQDLTQEALFVYTQVFCHALHIMAMLHPEVCEPLYVLALETLTCYETLSKTNPSVSSLLQRAHEQRFLKSIAEGIGPEERRQTLLQKMSSF

SEQ ID NO: 458 - DNA, 1511 bp, Homo sapien
cgacgcgggagccgcacgcgccggacgaggctcgctgcgctccctgttgcccagcgcgggcccgttgaggcggagccctcagttcccggccaggacacggtctgggccgccgaatctccggccgaagagcggcggcggcagcggcgggaaaaaaatgaagaatgaaattgctgccgttgtcttctttttcacaaggctagttcgaaaacatgataagttgaaaaaagaggcagttgagaggtttgctgagaaattgaccctaatacttcaagaaaaatataaaaatcactggtatccagaaaaaccatcgaaaggacaggcctacagatgtattcgtgtcaataaatttcagagagttgatcctgatgtcctgaaagcctgtgaaaacagctgcatcttgtatagtgacctgggcttgccaaaggagctcactctctgggtggacccatgtgaggtgtgctgtcgtagagatggggtttcaccatgttggccagactgctctcaaactcctgacctcgtgatccgcccgccttggcctcccaaagcgctggattacaggcgtgagccactgcgcccggcctcctcctttttgattatgtatggagagaaaaacaatgcattcattgttgccagctttgaaaataaagatgagaacaaggatgagatctccaggaaagttaccagggcccttgataaggttacctctgattatcattcaggatcctcttcttcagatgaagaaacaagtaaggaaatggaagtgaaacccagttcggtgactgcagccgcaagtcctgtgtaccagatttcagaacttatatttccacctcttccaatgtggcaccctttgcccagaaaaaagccaggaatgtatcgagggaatggccatcagaatcactatcctcctcctgttccatttggttatccaaatcagggaagaaaaaataaaccatatcgcccaattccagtgacatgggtacctcctcctggaatgcattgtgaccggaatcactggattaatcctcacatgttagcacctcactaacttcgtttttgattgtgttggtgtcatgttgagaaaaaggtagaataaaccttactacacattaaaagttaaaagttcttactaatagtagtgaagttagatgggccaaaccatcaaacttatttttatagaagttattgagaataatctttcttaaaaaatatatgcactttagatattgatatagtttgagaaattttattaaagttagtcaagtgcctaagtttttaatattggacttgagtatttatatattgtgcatcaactctgttggatacgagaaccctgtagaagtggacgatttgttttagcccctttgagaatttactttatggagcgtatgtaagttatttatatacaaggaaatctattttatgtcgttgtttaagagaattgtgtgaaatcatgtagttgcaaataaaaaatagtttgaggcaaaaaaaaaaaaaaaaaaaaaaaaaaaaaa

SEQ ID NO: 459 - protein, 296 aa, Homo sapien
MKNEIAAVVFFFTRLVRKHDKLKKEAVERFAEKLTLILQEKYKNHWYPEKPSKGQAYRCIRVNKFQRVDPDVLKACENSCILYSDLGLPKELTLWVDPCEVCCRRDGVSPCWPDCSQTPDLVIRPPWPPKALDYRREPLRPASSFLIMYGEKNNAFIVASFENKDENKDEISRKVTRALDKVTSDYHSGSSSSDEETSKEMEVKPSSVTAAASPVYQISELIFPPLPMWHPLPRKKPGMYRGNGHQNHYPPPVPFGYPNQGRKNKPYRPIPVTWVPPPGMHCDRNHWINPHMLAPH

SEQ ID NO: 460 - DNA, 2412 bp, Homo sapien
caggccaggactccacaaggctggtcccctgccctggagcaacttaaacaggccctctggccagcctggaaccctgagatggcctccagctcaggcagcagtcctcgcccggcccctgatgagaatgagtttccctttgggtgccctcccaccgtctgccaggacccaaaggagcccagggctctctgctgtgcaggctgtctctctgagaacccgaggaatggcgaggatcagatctgccccaaatgcagaggggaagacctccagtctataagcccaggaagccgtcttcgaactcaggagaaggctcaccccgaggtggctgaggctggaattgggtgcccctttgcaggtgtcggctgctccttcaagggaagcccacagtctgtgcaagagcatgaggtcacctcccagacctcccacctaaacctgctgttggggttcatgaaacagtggaaggcccggctgggctgtggcctggagtctgggcccatggccctggagcagaacctgtcagacctgcagctgcaggcagccgtggaagtggcgggggacctggaggtcgattgctaccgggcaccctgctccgagagccaggaggagctggccctgcagcacttcatgaaggagaagcttctggctgagctggaggggaagctgcgtgtgtttgagaacattgttgctgtcctcaacaaggaggtggaggcctcccacctggccctggccacctctatccaccagagccagctggaccgtgagcgcatcctgagcttggagcagagggtggtggagcttcagcagaccctggcccagaaagaccaggccctgggcaagctggagcagagcttgcgcctcatggaggaggcctccttcgatggcactttcctgtggaagatcaccaatgtcaccaggcggtgccatgagtcggcctgtggcaggaccgtcagcctcttctccccagccttctacactgccaagtatggctacaagttgtgcctgcggctgtacctgaatggagatggcactggaaagagaacccatctgtcgctcttcatcgtgatcatgagaggggagtatgatgcgctgctgccgtggcctttccggaacaaggtcaccttcatgctgctggaccagaacaaccgtgagcacgccattgacgccttccggcctgacctaagctcagcgtccttccagaggccccagagtgaaaccaacgtggccagtggatgcccactcttcttccccctcagcaaactgcagtcacccaagcacgcctacgtgaaggacgacacaatgttcctcaagtgcattgtggagaccagcacttagggtgggcggggctcctgagggagctccaactcagaagggagctagccagaggactgtgatgccctgcccttggcacccaagacctcagggcacaaagatgggtgaaggctggcatgatccaagcaagactgaggggtcgacttcgggctggccatctggttaggatggcaggacgtgggctgggcccacaaaggcaaagggtccagaaggagacaggcagagctgctcccctctgcacggaccatgcgacactgggaggccagtgagccactccggccccgaatgttgaggtggactctcaccaaatgagaagaaaatggaaccaggcttggaaccgtaggacccaagcagagaagctctcgggctaggaagatctctgcagggccgccagggagacctggacacaggcctgctctctttttctccagggtcagaaacaggaccgggtggaagggatggggtgccagtttgaatgcagtctgtccaggctcgtcattggaggtgaacaagcaaacccagagggctccactaggacttcaaattgggggttggatttgaagacttttaagtttccttccagcccagaaagtctctcattctaggcctcctggcccaggtgagtcctagagctacaggggttctggaaacattcaggagcttcctgtcctcccagctcctcactcaccttcagtaacccccactggactgacctggtccacagggcacctgccaccctgggcctggcagctcagcttccccaacacgcaggagcacacccagcccccacatcctgtgcctccatcagctaaacaccacgtcacttcatgcaggtgaaacccagtcactgtgagctcccaggtgcagccagaggcacctcaagaagaagaggggcataaactttcctcttcctgcctagaggccccacctttggtgctttccagaatcccgtaacacctgattaactgaggcatccacttctttcagcagactgatcaggacctccaagccactgagcaatgtataaccccaaagaaataatttttagaatctctttcgaagttttcctaaaaaaaaaaaaaaaaa

SEQ ID NO: 461 - protein, 416 aa, Homo sapien
MASSSGSSPRPAPDENEFPFGCPPTVCQDPKEPRALCCAGCLSENPRNGEDQICPKCRGEDLQSISPGSRLRTQEKAHPEVAEAGIGCPFAGVGCSFKGSPQSVQEHEVTSQTSHLNLLLGFMKQWKARLGCGLESGPMALEQNLSDLQLQAAVEVAGDLEVDCYRAPCSESQEELALQHFMKEKLLAELEGKLRVFENIVAVLNKEVEASHLALATSIHQSQLDRERILSLEQRVVELQQTLAQKDQALGKLEQSLRLMEEASFDGTFLWKITNVTRRCHESACGRTVSLFSPAFYTAKYGYKLCLRLYLNGDGTGKRTHLSLFIVIMRGEYDALLPWPFRNKVTFMLLDQNNREHAIDAFRPDLSSASFQRPQSETNVASGCPLFFPLSKLQSPKHAYVKDDTMFLKCIVETST

SEQ ID NO: 462 - DNA, 606 bp, Homo sapien
agacgcaagacgccgggcctacagcgggagcgtgaggaaagccgtgcgttgcgttccaaggcatctgtgagcccgcggagtatacaccatgagcaaagctcaccctcccgagttgaaaaaatttatggacaagaagttatcattgaaattaaatggtggcagacatgtccaaggaatattgcggggatttgatccctttatgaaccttgtgatagatgaatgtgtggagatggcgactagtggacaacagaacaatattggaatggtggtaatacgaggaaatagtatcatcatgttagaagccttggaacgagtataaataatggctgttcagcagagaaacccatgtcctctctccatagggcctgttttactatgatgtaaaaattaggtcatgtacattttcatattagactttttgttaaataaacttttgtaatagtcaaaaatgctttctcagatgttctgaatatagaatatcagctctcattccagttttttctaacatgaattttcctggttgacattgatttcaaagggttttatgcattaaagtgaaagaatcttattaaatgcgaaaaaaaaaaaaaaaaaaaaaaaaaaaaa

SEQ ID NO: 463 - protein, 76 aa, Homo sapien
MSKAHPPELKKFMDKKLSLKLNGGRHVQGILRGFDPFMNLVIDECVEMATSGQQNNIGMVVIRGNSIIMLEALERV

SEQ ID NO: 464 - DNA, 2054 bp, Homo sapien
cgggaggcggcagcggctgcagcgttggtagcatcagcatcagcatcagcggcagcggcagcggcctcgggcggggccggccggacggacaggcggacagaaggcgccaggggcgcgcgtcccgcccgggccggccatggagggcgcctccttcggcgcgggccgcgcaggggccgccctggaccccgtgagctttgcgcggcggccccagaccctgctccgggtcgcgtcctgggtgttctccatcgccgtcttcgggcccatcgtcaacgagggctacgtgaacaccgacagcggccccgagctgcgctgcgtgttcaacgggaacgcgggcgcctgccgcttcggcgtcgcgctgggcctcggagccttcctcgcctgcgccgccttcctgctgctcgatgtgcgcttccagcaaatcagcagcgtccgcgaccgccggcgcgcggtgttgctggacctgggcttctcaggactctggtccttcctgtggttcgtgggcttctgcttcctcaccaatcagtggcagcgcacggcgccagggccggccacgacgcaggcgggggacgcggcgcgggccgccatcgccttcagcttcttctccatcctcagctgggtggcgctcaccgtgaaggccctgcagcggttccgcctgggcaccgacatgtcactcttcgccaccgaacagctgagcaccggggcgagccaggcctaccccggctatccggtgggcagcggcgtggagggcaccgagacctaccagagcccgcccttcaccgagaccctggacaccagccccaaagggtaccaggtgcccgcctactagcggctggcaggcacagaccagggctccaaggccaccccaccaacgcaggccccagggtctccgggacctcccttgggtccttccagctcagtgccgcggacagagtaggtggccgctttgcgccatccggggccaagagggggtggacccgcgtgtctgggctgcccctgccaagttcccccagtccctcagcacctggccccaggactgaggtcctgagaaggggatagcactgcccaggacgtgtgtccctagcctggaatggactggcctggggaaggctttcccctcttgggccacacctgctcactctggggttgggggtccagctgccctctacgatcaggtgcaggggctgcccaggacaaagcgggggcaggggaaagacaccaccctcgccccaagactggggatcctggccactgttcccatcccatgtccctgtgggtagtgactgtctcgtttctgtcatggtggtgcgtcccgtccggagccactctccactttctctcacaggctgctagaacagcccagccctgtcagtgttgtgatcatggtccagtcttcgggtttcacctcctagtactccacaagctgctcctctctctgtggccccggcccctgcccaggtgtgggtggttctggccaggaaggcacaaggtagctgtgggccaagacaccagccctgtcctagcccttcagtaagaccttgccaggagaggagaaggatgcctgggtgccaggcaagacaagcccctcagcaggagagaggcccagaggctccagctggccaccgtgccccacaagatggcccctgtgtggttccctttaccttggcttcctggcccagtccctgcctctccacctgcaccctgcttcctggcccagtcccaggttggagtccctctgcatagctgactactcatgcattgctcaaagctggcttttcacattaagtcaacaccaaacgtggttgccacatttcatcagacagacacctccctctggagatgcagttgagtgacaaccttgttacattgtagcctagaccaattctgtgtggatatttaagtgaacatgtttacaatttttgtatatatcactctctccctctcctgaaagaccagagattgtgtattttcagtgtcccatgttccgactgcaccttctttacaataaagactgtaactgagctgactgtgaaaaaaaaaaaaaaaaaaaaaaaaaa

SEQ ID NO: 465 - protein, 229 aa, Homo sapien
MEGASFGAGRAGAALDPVSFARRPQTLLRVASWVFSIAVFGPIVNEGYVNTDSGPELRCVFNGNAGACRFGVALGLGAFLACAAFLLLDVRFQQISSVRDRRRAVLLDLGFSGLWSFLWFVGFCFLTNQWQRTAPGPATTQAGDAARAAIAFSFFSILSWVALTVKALQRFRLGTDMSLFATEQLSTGASQAYPGYPVGSGVEGTETYQSPPFTETLDTSPKGYQVPAY

SEQ ID NO: 466 - DNA, 2343 bp, Homo sapien
atacgactacacctgctccggagcccgcggcggtacctgcagcggaggagctctgtcttccccttcatctcacgcgagcccggcgtcccgccgcgtgcgccccggcgcagcccgccagtccgcccggagcccgcccagtcgccgcgctgcacgcccggggtgaaccctctgccctcgctgggacagagggccccgcagccgtcatgctttccgccatctacacagtcctggcgggactgctgttcctgccgctcctggtgaacctctgctgcccatacttcttccaggacataggctacttcttgaaggtggccgccgtgggccggagggtgcgcagctacgggcagcggcggccggcgcgcaccatcctgcgggcgttcctggagaaagcgcgccagacgccacacaagccttttctgctcttccgcgacgagactctcacctacgcgcaggtggaccggcgcagcaatcaagtggcccgggcgctgcacgaccacctcggcctgcgccagggagactgcgtggcgctccttatgggtaacgagccggcctacgtgtggctgtggctggggctggtgaagctgggctgtgccatggcgtgcctcaattacaacatccgcgcgaagtccctgctgcactgcttccagtgctgcggggcgaaggtgctgctggtgtcgccagaactacaagcagctgtcgaagagatactgccaagccttaaaaaagatgatgtgtccatctattatgtgagcagaacttctaacacagatgggattgactctttcctggacaaagtggatgaagtatcaactgaacctatcccagagtcatggaggtctgaagtcactttttccactcctgccttatacatttatacttctggaaccacaggtcttccaaaagcagccatgatcactcatcagcgcatatggtatggaactggcctcacttttgtaagcggattgaaggcagatgatgtcatctatatcactctgcccttttaccacagtgctgcactactgattggcattcacggatgtattgtggctggtgctactcttgccttgcggactaaattttcagccagccagttttgggatgactgcagaaaatacaacgtcactgtcattcagtatatcggtgaactgcttcggtatttatgcaactcaccacagaaaccaaatgaccgtgatcataaagtgagactggcactgggaaatggcttacgaggagatgtgtggagacaatttgtcaagagatttggggacatatgcatctatgagttctatgctgccactgaaggcaatattggatttatgaattatgcgagaaaagttggtgctgttggaagagtaaactacctacagaaaaaaatcataacttatgacctgattaaatatgatgtggagaaagatgaacctgtccgtgatgaaaatggatattgcgtcagagttcccaaaggtgaagttggacttctggtttgcaaaatcacacaacttacaccatttaatggctatgctggagcaaaggctcagacagagaagaaaaaactgagagatgtctttaagaaaggagacctctatttcaacagtggagatctcttaatggttgaccatgaaaatttcatctatttccacgacagagttggagatacattccggtggaaaggggaaaatgtggccaccactgaagttgctgatacagttggactggttgattttgtccaagaagtaaatgtttatggagtgcatgtgccagatcatgagggtcgcattggcatggcctccatcaaaatgaaagaaaaccatgaatttgatggaaagaaactctttcagcacattgctgattacctacctagttatgcaaggccccggtttctaagaatacaggacaccattgagatcactggaacttttaaacaccgcaaaatgaccctggtggaggagggctttaaccctgctgtcatcaaagatgccttgtatttcttggatgacacagcaaaaatgtatgtgcctatgactgaggacatctataatgccataagtgctaaaaccctgaaactctgaatattcccaggaggataactcaacatttccagaaagaaactgaatggacagccacttgatataatccaactttaatttgattgaagattgtgaggaaattttgtaggaaatttgcatacccgtaaagggagacttttttaaataacagttgagtctttgcaagtaaaaagatttagagattattatttttcagtgtgcacctactgtttgtatttgcaaactgagcttgttggagggaaggcattattttttaaaatacttagtaaattaaatgaac

SEQ ID NO: 467 - protein, 620 aa, Homo sapien
MLSAIYTVLAGLLFLPLLVNLCCPYFFQDIGYFLKVAAVGRRVRSYGQRRPARTILRAFLEKARQTPHKPFLLFRDETLTYAQVDRRSNQVARALHDHLGLRQGDCVALLMGNEPAYVWLWLGLVKLGCAMACLNYNIRAKSLLHCFQCCGAKVLLVSPELQAAVEEILPSLKKDDVSIYYVSRTSNTDGIDSFLDKVDEVSTEPIPESWRSEVTFSTPALYIYTSGTTGLPKAAMITHQRIWYGTGLTFVSGLKADDVIYITLPFYHSAALLIGIHGCIVAGATLALRTKFSASQFWDDCRKYNVTVIQYIGELLRYLCNSPQKPNDRDHKVRLALGNGLRGDVWRQFVKRFGDICIYEFYAATEGNIGFMNYARKVGAVGRVNYLQKKIITYDLIKYDVEKDEPVRDENGYCVRVPKGEVGLLVCKITQLTPFNGYAGAKAQTEKKKLRDVFKKGDLYFNSGDLLMVDHENFIYFHDRVGDTFRWKGENVATTEVADTVGLVDFVQEVNVYGVHVPDHEGRIGMASIKMKENHEFDGKKLFQHIADYLPSYARPRFLRIQDTIEITGTFKHRKMTLVEEGFNPAVIKDALYFLDDTAKMYVPMTEDIYNAISAKTLKL

SEQ ID NO: 468 - DNA, 2343 bp, Homo sapien; identical to SEQ ID NO: 466

SEQ ID NO: 469 - protein, 620 aa, Homo sapien; identical to SEQ ID NO: 467

SEQ ID NO: 470 - DNA, 1658 bp, Homo sapien
ctctctctctatctctctcagaatgacaattctaggtacaacttttggcatggttttttctttacttcaagtcgtttctggagaaagtggctatgctcaaaatggagacttggaagatgcagaactggatgactactcattctcatgctatagccagttggaagtgaatggatcgcagcattcactgacctgtgcttttgaggacccagatgtcaacaccaccaatctggaatttgaaatatgtggggccctcgtggaggtaaagtgcctgaatttcaggaaactacaagagatatatttcatcgagacaaagaaattcttactgattggaaagagcaatatatgtgtgaaggttggagaaaagagtctaacctgcaaaaaaatagacctaaccactatagttaaacctgaggctccttttgacctgagtgtcatctatcgggaaggagccaatgactttgtggtgacatttaatacatcacacttgcaaaagaagtatgtaaaagttttaatgcatgatgtagcttaccgccaggaaaaggatgaaaacaaatggacgcatgtgaatttatccagcacaaagctgacactcctgcagagaaagctccaaccggcagcaatgtatgagattaaagttcgatccatccctgatcactattttaaaggcttctggagtgaatggagtccaagttattacttcagaactccagagatcaataatagctcaggggagatggatcctatcttactaaccatcagcattttgagttttttctctgtcgctctgttggtcatcttggcctgtgtgttatggaaaaaaaggattaagcctatcgtatggcccagtctccccgatcataagaagactctggaacatctttgtaagaaaccaagaaaaaatttaaatgtgagtttcaatcctgaaagtttcctggactgccagattcatagggtggatgacattcaagctagagatgaagtggaaggttttctgcaagatacgtttcctcagcaactagaagaatctgagaagcagaggcttggaggggatgtgcagagccccaactgcccatctgaggatgtagtcgtcactccagaaagctttggaagagattcatccctcacatgcctggctgggaatgtcagtgcatgtgacgcccctattctctcctcttccaggtccctagactgcagggagagtggcaagaatgggcctcatgtgtaccaggacctcctgcttagccttgggactacaaacagcacgctgccccctccattttctctccaatctggaatcctgacattgaacccagttgctcagggtcagcccattcttacttccctgggatcaaatcaagaagaagcatatgtcaccatgtccagcttctaccaaaaccagtgaagtgtaagaaacccagactgaacttaccgtgagcgacaaagatgatttaaaagggaagtctagagttcctagtctccctcacagcacagagaagacaaaattagcaaaaccccactacacagtctgcaagattctgaaacattgctttgaccactcttcctgagttcagtggcactcaacatgagtcaagagcatcctgcttctaccatgtggatttggtcacaaggtttaaggtgacccaatgattcagctattt

SEQ ID NO: 471 - protein, 459 aa, Homo sapien [sequence omitted]

SEQ ID NO: 472 - DNA, 2058 bp, Homo sapien
gcccagacctatggattgaaagcgtgtgctttacccatctgctgtcttgctccatctgagaccagagccaagatctgcccaggactggaatgctttcccgagtggcttgagttggagcctgggactaggagcagccttattgaggtacaattcatgtgcttgtgggtttggatggcacaatctgtgtctgggctaaggaaagcagacttggcaccaacattaaccctgacagatccaggcatctattccaggaactggaagccaagcgcaacaggtgcttggaggtcatcatgatcagcccagaccccaggccctcccctggcttggcccggtgggctgagagctatgaggccaagtgtgagcgcaggcaagagatccgtgaaagccgccgctgccgtcccaatgtgaccacttgccgccaggtggggaagacgctgaggatccaacagagagagcagctccagagagctcgactgcagcagttcttcaggaggaggaacctggagctagaggagaagggcaaagcgcagcatccccaggccagggagcaagggccctccaggcggccaggacaggtgacaggcaccagctctgaagtctttccagcccagcatcctcctccctcaggcatctgcagggatctgtctgaccacctctcctcacaggctgggggccttcctccacaggacactcccatcaagaagccacccaaacaccaccgtggtactcagacaaaggcagaaggaccaacaattaagaacgatgccagtcagcaaaccaattacggagttgcagttctggataaggaaatcatccagctttctgattacctcaaagaggccctacaaagggagctggtcctaaaacagaaaatggtgattctccaagacctactgtccactctgattcaggcctctgacagctcttggaagggacagcttaatgaagacaaactgaaggggaaactgagatccttagaaaaccagctatacacctgtacccagaaatactccccttggggaatgaaaaaagtactactggagatggaagaccagaaaaacagctatgagcagaaggccaaggagtcactgcagaaagtgctggaggagaaaatgaatgcagagcagcaactacagagcacacagcgatccctggccctggcagagcagaagtgtgaagagtggaggagccagtatgaggctctgaaggaggactggaggacccttgggacccagcacagggagctggagagccaactccacgtgcttcagtccaaactgcagggagcagatagcagggacttacagatgaaccaggccctgcgatttttggaaaatgagcaccagcaactgcaggccaagattgaatgcctgcaaggggacagagacctgtgcagcttggatacccaggacctacaagatcaactaaaaaggtcagaggcagagaaactcaccctggtgaccagagtacagcagttgcagggtttgcttcaaaatcaatccttacagcttcaagaacaggagaaactcttaacaaagaaagatcaggctttgcccgtgtggagtccaaagtccttccctaacgaagtggagcctgagggtacagggaaggagaaagactgggatctcagagaccagctgcaaaagaagactttgcagctccaggccaaggaaaaggagtgcagagaactgcattcagaattagacaacctcagtgacgagtatctctcctgcctgcgtaagctgcagcactgtcgagaagagctgaaccagagccagcagctgcctcccagaaggcaatgtgggcgatggctcccagtgctgatggtggtgattgctgcagcactggcagtgttcctggccaataaagacaacctgatgatctgaataatttgtgacaactgccttgggtgaaaatcagaagcaagcaactcagcgaaaaactcagaaggtttgggtacattacagcttgggttttccaactgacttaggatttctgactttttattaatttcttaacctactgtaaataaacttcacctgaccagattgttcctca

SEQ ID NO: 473 - protein, 531 aa, Homo sapien
MISPDPRPSPGLARWAESYEAKCERRQEIRESRRCRPNVTTCRQVGKTLRIQQREQLQRARLQQFFRRRNLELEEKGKAQHPQAREQGPSRRPGQVTGTSSEVFPAQHPPPSGICRDLSDHLSSQAGGLPPQDTPIKKPPKHHRGTQTKAEGPTIKNDASQQTNYGVAVLDKEIIQLSDYLKEALQRELVLKQKMVILQDLLSTLIQASDSSWKGQLNEDKLKGKLRSLENQLYTCTQKYSPWGMKKVLLEMEDQKNSYEQKAKESLQKVLEEKMNAEQQLQSTQRSLALAEQKCEEWRSQYEALKEDWRTLGTQHRELESQLHVLQSKLQGADSRDLQMNQALRFLENEHQQLQAKIECLQGDRDLCSLDTQDLQDQLKRSEAEKLTLVTRVQQLQGLLQNQSLQLQEQEKLLTKKDQALPVWSPKSFPNEVEPEGTGKEKDWDLRDQLQKKTLQLQAKEKECRELHSELDNLSDEYLSCLRKLQHCREELNQSQQLPPRRQCGRWLPVLMVVIAAALAVFLANKDNLMI

SEQ ID NO: 474 - DNA, 7033 bp, Homo sapien
ggctccagctccagcagccatggcgccttgtgcagcctcctttgtgggtggagaagagctcagccaaccttggatggagcgtcggtgaagcaagagctcagaggggagaggggctggcctggcatgaccgtcgccagtccccccacctggctgggtgatgtcccccggcccgggttctggggccccttggcagtaccatggagcaactgacaaccctcccacggcctggggaccctggagccatggagccatgggcactgcccacctggcatagctggactccaggtcgagggggtgaacctagcagtgcagccccaagcatcgctgatactcctccggcagctctgcagcttcaagaactgaggtctgaggagagttccaagcccaaaggagacgggagctccaggcccgtggggggaactgaccctgaaggagcagaggcttgtctgcccagcctgggccagcaagcatccagctctggacccgcctgccagaggccagaggatgaggaagtggaggctttcctgaaggccaagctgaatatgagctttggggacaggcccaatctggagctgctgagggccctgggggagctgcggcagcgctgtgccatccttaaggaggaaaaccagatgctgaggaagagcagcttccctgagacagaagagaaggtgcggaggctgaagcggaagaacgccgagctggcggtcattgccaagcgcctggaggagagggcccgaaagctgcaggaaacgaacctgagggtggtgagtgcccccttgccccggccggggaccagcttggagttgtgtcggaaggccctagcccgccagcgagcccgggacctcagtgagacagccagtgcactgctggccaaggacaagcagattgctgccttgcagcgggagtgcagggagctgcaggccaggctcactctggtgggcaaggagggtccccagtggctccacgtgcgggacttcgatcggctgctgcgcgagtcccagcgggaggtgctgcggctgcagaggcagatcgcgctgcgcaaccagcgggagacgctcccgctcccgccgtcctggcccccgggccctgctctccaggccagagcaggggcgcctgctcccggggccccgggagaggccacgccccaggaggatgcggacaacctacccgtgattctaggggagccagagaaagagcagagggtgcagcagctggaatcggagctcagcaagaagcggaagaaatgcgagagcctggagcaggaagcccggaaaaagcagaggcgatgtgaggagctggaactgcagctgagacaagcgcagaatgagaatgcccgcctggtggaggagaactcccggctcagtgggagagccacagagaaggagcaggtggagtgggagaatgcggagctgaggggccagctcctgggggtgacacaggagagggactcagcccttcgcaagagccagggcctgcagagcaagctggagagcctggagcaagtgctgaagcacatgcgggaggtggcccagcggcggcagcagctggaggtggagcatgaacaggctcggctcagcctacgggagaagcaggaggaggtccggagactgcagcaggcccaggctgaagcccagagggaacatgaaggagccgtgcagctgctggagtctaccttggattccatgcaggcccgggttcgagagctcgaagaacagtgccgcagccaaaccgagcagttcagcctcctggcacaagaactccaggctttccgcctgcacccgggccccttggatctgctcacatctgccctggactgtgggagccttggagactgcccaccacccccctgctgctgctccattccccagccttgccgggggtctggccccaaagaccttgacctcccgccgggctcccctgggcgctgcaccccaaagtcttccgagcctgcccctgccactctcactggggtccctcgaaggacagccaagaaggcagagtctctctccaactcctcccactccgagtccatccacaacagccccaagtcatgccctacacctgaggtggacacagccagtgaggtagaggagctggaggcagacagtgtctccctgctcccagctgcgccagagggcagccggggaggagccaggatccaggtcttcctagcacgttatagctacaacccctttgagggtcccaatgagaatccagaagcagagcttccgctgacagctggcgagtacatctacatctatggcaacatggatgaggatggcttttttgaaggagagctcatggatggccgaaggggcctggtcccttccaattttgtagagcgtgtgtcggatgatgacctcctgacctccctccctccagagctggccgatttgtcccacagctcaggccctgaactcagtttcctgagtgtaggtgggggtggcagcagtagcgggggccaaagcagtgtgggaaggagccagcccagacctgaggaggaggatgcaggggacgagctcagtctgagcccatcaccggagggcctgggcgagcctcctgccgtgccttacccccgccgtctggtggtcctcaagcagctggcccacagcgtggtgctggcctgggagccgcctcctgagcaagtggagctacacggcttccatatctgtgtgaatggggagctgcgacaggccctggggcctggggcgccacccaaggccgtgctggagaacctggacctgtgggccgggccccttcacatttctgtccaggccctgactagccggggcagctctgacccactgcgctgttgcttggcggtgggtgcccgggccggagtggtgcccagccagctgcgggtccatcggttgacagccacatctgctgagatcacctgggtgcccggcaatagcaacttggcccatgccatctacctcaatggggaagaatgcccacctgccagccccagtacctactgggccaccttctgccacttacggcctggcacaccctatcaggcccaagtggaggctcagctcccaccccaagggccctgggaaccaggctgggagaggctggagcagcgggctgccaccctgcagttcaccacactcccagcaggcccacctgatgcccctctggatgtgcagatcgagcctgggccctcccctgggatcttgatcatcagttggctcccagtcaccatcgatgctgctggcacatccaacggtgtccgggtcacaggctatgccatctacgctgatgggcagaagatcatggaggtggcctcacccacggcaggcagtgtactggtggagttgtcccagctgcagctgctgcaggtgtgtcgtgaggtggtcgtgcgcaccatgtcgccccacggggagtcggcggactccatcccggctcctatcactcccgccctggctccggccagcctgccagcccgagtctcctgcccctcaccgcacccaagcccagaggccagagcgccccttgcttcagcctccccagggcctggagaccccagctctcctctccagcaccctgctccccttggaactcaagagcctccaggagcaccccctgcaagcccttccagagagatggcaaaagggtcccacgaggaccctccagcaccttgctcccaggaggaggctggggcagcagtgctgggcacctcagaggagaggacagccagcacatctaccctgggtgagaaggaccctggccccgcagctccctcactggccaagcaggaggccgagtggactgcaggagaggcctgtccggcctccagctccacccagggagcacgggcccagcaggcgccaaataccgagatgtgccaaggaggagacccagggtctgggctgaggcccagggctgagaaggaggacacagcagagcttggggttcatctggtgaactccctcgtggaccacggccgcaactcagacctgtcagacatccaggaggaagaggaagaggaggaggaggaggaggaagaggagctgggttccaggacttgctccttccagaagcaggttgctggcaacagcatcagggagaatggggccaagtcccagcccgaccccttttgtgagactgacagcgatgaggagatcttggagcagatcctggagctgcccctccagcagttctgtagcaagaagctctttagcatcccggaggaggaggaagaggaagaggaggacgaggaggaggagaagtctggggcaggctgttcttcccgagaccctggcccgcctgaacctgcattgctggggctgggctgtgacagtggtcagccccgaagacctggccagtgtcccttgtctcctgagtcctccagggctggagactgcctggaagacatgcctggattagttggtggaagcagccggaggagaggagggggctcccctgagaagcccccaagccgcaggcggcctccagatccccgagaacactgcagccgacttctcagcaacaatgggccccaggcctctggacgactgggccccacacgggagaggggtggcctccccgtaattgagggccccaggactggactagaggctagcgggagaggccggctgggcccttcccggaggtgctcccgtggccgggcgctggagcctggcctggccagctgcctttcccccaagtgcttggaaatcagcattgaatatgattcggaggatgagcaggaggcgggcagcgggggcatcagcatcaccagctcctgctaccctggagatagggaggcctggggcacagcaactgtaggaaggcccagggggcctccgaaggccaattcaggccccaagccctacccacgcctcccagcctgggagaaaggggaaccagagcggagaggccgcagtgcgacgggcagagccaaggagccactctcccgggcaacagagaccggagaggccagagggcaggacggctctgggcggaggggcccccagaagagaggtgtccgagtcctcaggccaagcactgcagagctagtccctgcgaggagcccctcagaaacactggcttaccagcacctacccgtcaggatctttgtggctctgtttgactatgaccccgtgtcaatgtcgcccaatcctgatgctggagaagaagagcttcccttccgagagggtcagatcctgaaggtgtttggggacaaggatgccgatggcttctaccagggcgaaggtgggggccggacaggctacattccctgcaacatggtggctgaggtggctgtggacagccctgctgggagacagcaactgctccagcggggttatttgtccccagatattctccttgagggctcagggaatggtccgtttgtgtactccacagcccacacaactgggcctcctcccaagccccgccgctccaagaaagctgagtcggaaggccctgcccagccctgtccaggcccccctaagctggtcccctctgctgacctgaaagctccccactccatggtggctgcatttgactacaacccccaggagagttcccccaatatggacgtggaggcagagctgcccttccgggcaggggatgtcattactgtgtttgggggcatggacgatgacggtttctactatggggaattaaatggacaaaggggcctggttccatccaacttcctggagggccctgggcctgaggcaggcggcctggacagggaacccaggacaccccaggctgagagtcagagaacgaggaggagaagagtccagtgctagatggagatagatatatgtagagagagcaacatgactggggctgcaccacacaagggtccccagggcccccaggtgggccttgtacccccagctctggcagcgcccccaggattgaacgtggggagccccagggcagaagcgagaaggtgtgggtttttttccaaggggaagcagctcctcaggaggatgggctctgggaagaaggagtgaagctgtggcccatcctgcaggcagaagaggccctgagaggcccccagatcactgtttttgctgagcagggaaggctcagaatgggcccagagcccccgttcttttgcgttaacactgtggcattcagagggaatcaaagagccttggtgaaggtcagagctaaatggctccttaaggatgaactttttagagaagcaccttcctcctacaggaggggaaactgagcccacagtgagtatgtaacttgaccaaggtcactgagccaggactggacccaggaccctcgcgtcctggtccacccacctcgtctactagtgtcccacagtgctgcgctagtcccttttgccacccttcccagtcccaggacgggccctggagggagaaaggagcctgtgccccctgatggctctggctgtcctgatcctgtcttccctcccctgaaggaaagtttgcactggattttattggagccccatctccccagcgggcaggcgggcggagcctgtatatatgtatatactcagtgcctcagttcagcttcctccacctcgcttccactgcacaggcccaggaaggagaaaggccaagccaaagtgggccccaccctgcccccgtcgtgctccatccttccctgccggggcctgctggcccctgtaaggtcccgcccccaaagaccctggggccagcggggccgaaagcggagttgggtttgcttattttgctcattggattcaagttcttttgcatagtttttttctaacccctgttggagtccaggggctggagaaaaggacagatttatgcagctattttcatacattccctgttcagagtggggtaggggttttccgccgttacccgatccaatccatcccccaccctttgaggggtgagtgtgtctttgcatgtttcctttgctgtggtgggagatagtttgactgaacccccaccttgaccttggtctccaggggtgtggaatggtgggggaatttgtttaaaaagacattttattataataaagtctattttcacaaaaaaaaaaaaaaaaaaaa

SEQ ID NO: 475 - protein, 1857 aa, Homo sapien
MEQLTTLPRPGDPGAMEPWALPTWHSWTPGRGGEPSSAAPSIADTPPAALQLQELRSEESSKPKGDGSSRPVGGTDPEGAEACLPSLGQQASSSGPACQRPEDEEVEAFLKAKLNMSFGDRPNLELLRALGELRQRCAILKEENQMLRKSSFPETEEKVRRLKRKNAELAVIAKRLEERARKLQETNLRVVSAPLPRPGTSLELCRKALARQRARDLSETASALLAKDKQIAALQRECRELQARLTLVGKEGPQWLHVRDFDRLLRESQREVLRLQRQIALRNQRETLPLPPSWPPGPALQARAGAPAPGAPGEATPQEDADNLPVILGEPEKEQRVQQLESELSKKRKKCESLEQEARKKQRRCEELELQLRQAQNENARLVEENSRLSGRATEKEQVEWENAELRGQLLGVTQERDSALRKSQGLQSKLESLEQVLKHMREVAQRRQQLEVEHEQARLSLREKQEEVRRLQQAQAEAQREHEGAVQLLESTLDSMQARVRELEEQCRSQTEQFSLLAQELQAFRLHPGPLDLLTSALDCGSLGDCPPPPCCCSIPQPCRGSGPKDLDLPPGSPGRCTPKSSEPAPATLTGVPRRTAKKAESLSNSSHSESIHNSPKSCPTPEVDTASEVEELEADSVSLLPAAPEGSRGGARIQVFLARYSYNPFEGPNENPEAELPLTAGEYIYIYGNMDEDGFFEGELMDGRRGLVPSNFVERVSDDDLLTSLPPELADLSHSSGPELSFLSVGGGGSSSGGQSSVGRSQPRPEEEDAGDELSLSPSPEGLGEPPAVPYPRRLVVLKQLAHSVVLAWEPPPEQVELHGFHICVNGELRQALGPGAPPKAVLENLDLWAGPLHISVQALTSRGSSDPLRCCLAVGARAGVVPSQLRVHRLTATSAEITWVPGNSNLAHAIYLNGEECPPASPSTYWATFCHLRPGTPYQAQVEAQLPPQGPWEPGWERLEQRAATLQFTTLPAGPPDAPLDVQIEPGPSPGILIISWLPVTIDAAGTSNGVRVTGYAIYADGQKIMEVASPTAGSVLVELSQLQLLQVCREVVVRTMSPHGESADSIPAPITPALAPASLPARVSCPSPHPSPEARAPLASASPGPGDPSSPLQHPAPLGTQEPPGAPPASPSREMAKGSHEDPPAPCSQEEAGAAVLGTSEERTASTSTLGEKDPGPAAPSLAKQEAEWTAGEACPASSSTQGARAQQAPNTEMCQGGDPGSGLRPRAEKEDTAELGVHLVNSLVDHGRNSDLSDIQEEEEEEEEEEEEELGSRTCSFQKQVAGNSIRENGAKSQPDPFCETDSDEEILEQILELPLQQFCSKKLFSIPEEEEEEEEDEEEEKSGAGCSSRDPGPPEPALLGLGCDSGQPRRPGQCPLSPESSRAGDCLEDMPGLVGGSSRRRGGGSPEKPPSRRRPPDPREHCSRLLSNNGPQASGRLGPTRERGGLPVIEGPRTGLEASGRGRLGPSRRCSRGRALEPGLASCLSPKCLEISIEYDSEDEQEAGSGGISITSSCYPGDREAWGTATVGRPRGPPKANSGPKPYPRLPAWEKGEPERRGRSATGRAKEPLSRATETGEARGQDGSGRRGPQKRGVRVLRPSTAELVPARSPSETLAYQHLPVRIFVALFDYDPVSMSPNPDAGEEELPFREGQILKVFGDKDADGFYQGEGGGRTGYIPCNMVAEVAVDSPAGRQQLLQRGYLSPDILLEGSGNGPFVYSTAHTTGPPPKPRRSKKAESEGPAQPCPGPPKLVPSADLKAPHSMVAAFDYNPQESSPNMDVEAELPFRAGDVITVFGGMDDDGFYYGELNGQRGLVPSNFLEGPGPEAGGLDREPRTPQAESQRTRRRRVQC

SEQ ID NO: 476 - DNA, 466 bp, Homo sapien
accactgctggctttttgctgtagctccacattcctgtgcattgaggggttaacattaggctgggaagatgacaaaacttgaagagcatctggagggaattgtcaatatcttccaccaatactcagttcggaaggggcattttgacaccctctctaagggtgagctgaagcagctgcttacaaaggagcttgcaaacaccatcaagaatatcaaagataaagctgtcattgatgaaatattccaaggcctggatgctaatcaagatgaacaggtcgactttcaagaattcatatccctggtagccattgcgctgaaggctgcccattaccacacccacaaagagtaggtagctctctgaaggctttttacccagcaatgtcctcaatgagggtcttttctttccctcaccaaaacccagccttgcccgtggggagtaagagttaataaacacactcacgaaaagtt

SEQ ID NO: 477 - protein, 92 aa, Homo sapien
MTKLEEHLEGIVNIFHQYSVRKGHFDTLSKGELKQLLTKELANTIKNIKDKAVIDEIFQGLDANQDEQVDFQEFISLVAIALKAAHYHTHKE

SEQ ID NO: 478 - DNA, 2412 bp, Homo sapien
tgaattcgggaagcgccgcagcggcggatccggcggctgctgcagcccgggcggctgccgagaaggagggaggggaaacacaaagccggctacgcgctgcgagataacaagagtaatccacagacttaaaacatgagctcagatgccagccaaggcgtgattaccactcctcctcctcccagcatgcctcacaaagagagatattttgaccgcatcaatgaaaatgacccagaatacattagggagaggaacatgtctcctgatctacgacaagacttcaacatgatggagcagaggaaacgagttactcagatcctgcaaagtcctgcctttcgggaagacttggaatgccttattcaagaacagatgaagaaaggccacaacccaactggattactagcattacagcagattgcagattacatcatggccaattctttctcgggtttttcttcacctcctctcagtcttggcatggtcacacctatcaatgaccttcctggtgcagatacatcctcatatgtgaagggagaaaaacttactcgctgtaaacttgccagcctgtacagacttgtagacttgtttggatgggcacacctggcaaatacctatatctcagtaagaataagtaaggagcaagaccacattataataattcccagaggcctatctttttctgaagctacagcctccaatttggtgaaagtcaatataataggagaagtggttgaccagggaagtaccaatttgaaaattgaccatacaggattcagtccccatgctgcaatctattcaacacgtcctgatgttaagtgtgtgatacacatccatacccttgcaacagcagctgtatcctccatgaaatgtgggatccttccaatttctcaagagtctcttcttctgggagatgttgcctattatgactaccaagggtcacttgaagaacaggaggagagaattcaactgcagaaggttctgggaccaagttgtaaggtgctggtactcaggaatcatggtgtggttgcacttggagaaacattagaggaggcttttcattatatttttaatgtgcaactagcctgtgagattcaggtgcaggccctagcaggtgcaggtggagtagacaatctccatgtactggactttcagaagtataaagctttcacttacactgtagcagcgtctggtggaggaggtgtgaatatgggttcccatccaaaatggaaggttggcgaaattgagtttgaagggcttatgaggactctggacaacttggggtatagaacaggctatgcttacaggcatcctctcattcgagagaagcctaggcacaagagtgatgtggaaatcccagcaactgtgactgctttttcctttgaagacgatacaatgccactctctcctctccaaatacatggcacaagaggcaacaagcgtgaaaaaacaagatggctgaactcaccaaatacttacatgaaagtgaatgtgcctgaggagtctcggaacggagaaaccagtccccgaaccaaaatcacgtggatgaaagcagaagactcatctaaagttagtggtggaacacctatccaaattgaagatccaaatcagtttgttcctttaaacacaaacccgaatgaggtactagaaaagagaaataagattcgggaacaaaatcgatatgacttgaaaacagcaggaccacaatctcagttgcttgctggaattgttgtggataagccaccttctactatgcaatttgaagatgatgatcatggcccaccagctcctcctaacccatttagtcatctcacagaaggagaacttgaagagtataagaggacaatcgaacgtaaacaacaaggcctagaagaaaaccatgagctgttttccaagagcttcatctccatggaagtgcctgtcatggtagtaaatggcaaggatgatatgcatgatgttgaagatgagcttgctaagcgagtgagtaggttaagcacaagtacaaccatagaaaacatcgagattactattaagtctccagagaaaatcgaagaagtcctgtcacctgaaggctccccttcaaaatcgccatccaagaaaaagaagaaattccgcactccttcttttctgaaaaagaacaaaaaaaaggagaaagttgaggcctaaataaagtctttttataattattattataacaatgtgacattgcacatctaaataccacatttaagttgatcattaatatgcaatggtagatcagattgggggatgtagcaaactggactttaagaactggaaagaggttttacaaaagaaaaacttcaagattcatctctcattttatatgtccagaaatggctttggaattttaagcaattactagttttaattagctctgccctcatgaagtttattatt

SEQ ID NO: 479 - protein, 675 aa, Homo sapien [sequence omitted]

SEQ ID NO: 480 - DNA, 1807 bp, Homo sapien
ctttccgtccccttgcttcgtcttcgcttttctttctacttattcttatctgtgtctttcgctttgtttgcctctccgtctgttttccctcagggcccccttctttcctcgaccttttcaaatcgcaaatatggcgccggagcggctgcggagccgggcgccctccgccttcaagttgcggggcttgctgctccgtggtgaagctattaagtacctcacagaagctcttcagtctatcagtgaattagagcttgaagataaactggaaaagataattaatgcagttgagaagcaacccttgtcatcaaacatgattgaacgatctgtggtggaagcagcagtccaggaatgcagtcagtctgttgatgaaactatagagcacgttttcaatatcataggagcatttgatattccacgctttgtgtacaattcagaaagaaaaaaatttcttcctctgttaatgaccaaccaccctgcaccaaatttatttggaacaccaagagataaagcagagatgtttcgtgagcgatataccattttgcaccagaggacccacaggcatgaattatttactcctccggtgataggttctcaccctgatgaaagcggaagcaaattccagcttaaaacaatagaaaccttattgggtagtacaaccaaaatcggagatgcgattgttcttggaatgataacgcagttaaaagagggaaaattttttctggaagatcctactggaacagtccaactagaccttagtaaagctcagttccatagtggtttatacacagaggcatgctttgtcttagcagaaggttggtttgaagatcaagtgtttcatgtcaatgcctttggatttccacccactgagccctctagtactactagggcatactatggaaatattaatttttttggaggtccttctaatacatctgtgaagacttctgcaaaactaaaacagctagaagaggagaataaagatgctatgtttgtgtttttatctgatgtttggttggaccaggtggaagtattggaaaaacttcgcataatgtttgctggttattcaccagcacctccaacctgctttattctgtgtggtaatttttcatctgcaccatatggaaaaaatcaagttcaagctttgaaagattccctaaaaactttggcagatataatatgtgaatacccagatattcaccaaagtcgttttgtgtttgtacctggtccagaggatcctggatttggttccatcttaccaaggccaccacttgctgaaagcatcactaatgaattcagacaaagggtaccattttcagtttttactactaatccttgcagaattcagtactgtacacaggaaattactgtcttccgtgaagacttagtaaataaaatgtgcagaaactgcgtccgttttcctagcagcaatttggctattcctaatcactttgtaaagactatcttatcccaaggacatctgactcccctacctctttatgtctgcccagtgtattgggcatatgactatgctttgagagtgtatcctgtgcccgatctacttgtcattgcagacaaatatgatcctttcactacgacaaataccgaatgcctctgcataaaccctggctcttttccaagaagtggattttcattcaaagttttttatccttctaataagacagtagaagatagcaaacttcaaggcttttgagattcttaaagatcatctgaagaaaattcatcagttttctgcttaactctatatcttatgtgattctgatattacaataaaattatggtaaacttt

SEQ ID NO: 481 - protein, 526 aa, Homo sapien
MAPERLRSRAPSAFKLRGLLLRGEAIKYLTEALQSISELELEDKLEKIINAVEKQPLSSNMIERSVVEAAVQECSQSVDETIEHVFNIIGAFDIPRFVYNSERKKFLPLLMTNHPAPNLFGTPRDKAEMFRERYTILHQRTHRHELFTPPVIGSHPDESGSKFQLKTIETLLGSTTKIGDAIVLGMITQLKEGKFFLEDPTGTVQLDLSKAQFHSGLYTEACFVLAEGWFEDQVFHVNAFGFPPTEPSSTTRAYYGNINFFGGPSNTSVKTSAKLKQLEEENKDAMFVFLSDVWLDQVEVLEKLRIMFAGYSPAPPTCFILCGNFSSAPYGKNQVQALKDSLKTLADIICEYPDIHQSRFVFVPGPEDPGFGSILPRPPLAESITNEFRQRVPFSVFTTNPCRIQYCTQEITVFREDLVNKMCRNCVRFPSSNLAIPNHFVKTILSQGHLTPLPLYVCPVYWAYDYALRVYPVPDLLVIADKYDPFTTTNTECLCINPGSFPRSGFSFKVFYPSNKTVEDSKLQGF

SEQ ID NO: 482 - DNA, 1743 bp, Homo sapien
ggcgcggggacgcgggtttctgcctcaggccctgccctgctctactctgcgctctctgcccgcgccgccgccgcctcagcctcggccctgcgctgcgcgcccggcccgtgctgccatggcctgccgcccgcgaagcccgccgaggcatcagagccgctgcgacggtgacgccagcccgccgtcccccgcgcgatggagcctgggacggaagcgcagagccgacggcaggcgctggaggcccgaagacgccgaggaggcagagcaccgcggcgccgagcgcagacccgagagctttaccactcctgaaggccctaaaccccgttccagatgctctgactgggcaagtgcagttgaagaagatgaaatgaggaccagagttaacaaagaaatggcaagatataaaaggaaactcctcatcaatgactttggaagagagagaaaatcatcatcaggaagttctgattcaaaggagtctatgtctactgtgccggctgactttgagacagatgaaagtgtcctaatgaggagacagaagcagatcaactatgggaagaacacaattgcctacgatcgttatattaaagaagtcccaagacaccttcgacaacctggcattcatcccaagacccctaataaatttaagaagtatagtcgacgttcatgggaccagcaaatcaaactctggaaggtggctctgcatttttgggatcctccagcggaagaaggatgtgatttgcaagaaatacaccctgtagaccttgaatctgcagaaagcagctccgagccccagaccagctctcaggatgactttgatgtgtactctggcacacccaccaaggtgagacacatggacagtcaagtggaggatgagtttgatttggaagcttgtttaactgaacccttgagagacttctcagccatgagctaactgccccctggcggccaggaagagaaacagctcctccccgactaggtggaaggctggccaggcaccaagcatgtgtgtgcacttgtacctggtggtttctctgttagcagtccattagctcatgctgaattatttttgccttactttcttaagaaacattaattttatgtatagtgagtatattttgcatgttttaaattgtaaatggagctaagtccaagaaagtacttgaagctctcttccagcgagcttaattgcgtaatccctgttgtcctccagggtaagctgacacgtctacataactggttttccacaggcatcttcagttattgcttgtcaggtggactgttttggatttaaccatgtaatccatgggaccaattgagagtcagctacttttataggcatcaaagtattctcagacacctttaatatctttatggaaacttaatttttggccttttatcaatatgtcataacagcattctgaagtcagacattgttaaattgagctattaaactaatgagttttatgtaagttatatggtcttaatttggtacttgtaaatagcactagttagactctttagaatactccaagagttagggcagcagagtggagcgatttagaaagaacattttaaaacaatcagttaatttaccatgtaaaattgctgtaaatgataatgtgtacagattttctgttcaaatattcaattgtaaacttcttgttaagactgttacgtttctattgcttttgtatgggatattgcaaaaataaaaaggaaagaaccctcaaaaaaaaaaaaaaaaaa

SEQ ID NO: 483 - protein, 270 aa, Homo sapien
MACRPRSPPRHQSRCDGDASPPSPARWSLGRKRRADGRRWRPEDAEEAEHRGAERRPESFTTPEGPKPRSRCSDWASAVEEDEMRTRVNKEMARYKRKLLINDFGRERKSSSGSSDSKESMSTVPADFETDESVLMRRQKQINYGKNTIAYDRYIKEVPRHLRQPGIHPKTPNKFKKYSRRSWDQQIKLWKVALHFWDPPAEEGCDLQEIHPVDLESAESSSEPQTSSQDDFDVYSGTPTKVRHMDSQVEDEFDLEACLTEPLRDFSAMS

SEQ ID NO: 484 - DNA, 641 bp, Homo sapien
atttaaattctgcagctcagagattcacacagaagtctggacacaattcagaagagccacccagaaggagacaacaatgtccctgctacccgtgccatacacagaggctgcctctttgtctactggttctactgtgacaatcaaagggcgaccacttgcctgtttcttgaatgaaccatatctgcaggtggatttccacactgagatgaaggaggaatcagacattgtcttccatttccaagtgtgctttggtcgtcgtgtggtcatgaacagccgtgagtatggggcctggaagcagcaggtggaatccaagaatatgccctttcaggatggccaagaatttgaactgagcatctcagtgctgccagataagtaccaggtaatggtcaatggccaatcctcttacacctttgaccatagaatcaagcctgaggctgtgaagatggtgcaagtgtggagagatatctccctgaccaaatttaatgtcagctatttaaagagataaccagacttcatgttgccaaggaatccctgtctctacgtgaacttgggattccaaagccagctaacagcatgatcttttctcacttcaatccttactcctgctcattaaaacttaatcaaacttcaaaaaaaaaaaa

SEQ ID NO: 485 - protein, 142 aa, Homo sapien
MSLLPVPYTEAASLSTGSTVTIKGRPLACFLNEPYLQVDFHTEMKEESDIVFHFQVCFGRRVVMNSREYGAWKQQVESKNMPFQDGQEFELSISVLPDKYQVMVNGQSSYTFDHRIKPEAVKMVQVWRDISLTKFNVSYLKR

SEQ ID NO: 486 - DNA, 2569 bp, Homo sapien
ctcggcgcgcgcttggggcgaggctcggcgggcgcggacgcgcagcatggcggtggaggacgaggggctccgggtcttccagagcgtgaagatcaagatcggtgaagccaaaaaccttccctcttacccggggccgagcaagatgagggattgctactgcacggtgaacctggaccaggaggaggttttcaggaccaaaattgtggaaaagtcactctgcccgttttacggagaagacttttactgtgaaattcctcggagctttcgtcacctgtccttctacattttcgatagagacgttttccggagggattccatcatagggaaggtggccatccagaaggaggacttgcagaagtaccacaacagggacacctggttccagctgcagcacgtggacgctgactcggaagtgcagggcaaagtgcacctggagctgcggctgagcgaggtcatcacagacactggggtcgtctgccacaagctcgccacacgcatcgtcgagtgccagggcctccccatcgtgaatgggcaatgtgacccctacgccaccgtgacgctggcaggacccttcagatcagaagcaaagaagacgaaagtgaagaggaagaccaacaatccccagttcgatgaagtgttttattttgaggtgacccggccctgtagctacagcaagaagtcccactttgactttgaggaggaagacgtggacaagctcgaaatcagagttgacctctggaatgccagtaacctgaagtttggagatgaattcctgggagaactaaggatcccgttgaaagtcctgcggcagtccagctcctacgaggcgtggtacttcctccagccccgggacaatggtagcaagagcctaaagccagacgacctgggctccctgcggctgaacgtggtatacacggaagaccacgtgttttcttctgactattacagccctctgcgggacctgctgttgaagtctgcggatgtggagcccgtgtcagcgtctgcggcccacatcctgggcgaggtttgccgggagaagcaggaggcggccgtcccgctggtgcggctcttcctacactatggcagggtggtgccattcatcagtgccatcgccagcgcggaggtgaagcggacccaggaccccaacaccatcttccgaggaaactcactggcgtccaagtgcattgacgagaccatgaagctggcggggatgcattacctgcatgtcaccctgaagcccgccatcgaggagatatgccagagccacaaaccctgtgaaatcgaccctgtgaagttgaaagacggagaaaaccttgaaaacaacatggagaacctacggcagtatgtggaccgcgtcttccacgccatcaccgagtctggggtgagctgcccgaccgtcatgtgtgacatcttcttctccctccgggaggcggcggccaagcgcttccaggatgacccggacgtcaggtacactgcagtgagcagcttcatcttcctgaggttctttgcgcccgccattctctcccccaacctcttccagctcacgccgcaccacacggacccccagacgtccaggacgctgacattgatctccaagaccgttcagaccctcggcagcctgtccaagtccaaatctgcgagttttaaggagtcctacatggctacattttatgaattcttcaatgagcagaaatatgctgatgcggtgaagaacttcttggatctgatttcgtcctcggggagaagagaccccaagagtgttgagcagcccatcgtgcttaaagaagggttcatgatcaagagggcccaaggacggaagcgctttgggatgaagaattttaagaagagatggtttcgtttgaccaaccatgaatttacctaccacaaaagcaaaggggaccagcctctctacagcattcccatcgagaacatcctggcagtggagaagctggaggaggagtctttcaaaatgaaaaacatgttccaggtcatccagccagagcgtgcgctgtacatccaggccaacaactgcgtggaggccaaggactggatcgacattctcaccaaagtgagccagtgcaaccagaagcgcctcaccgtctaccacccgtccgcctacctgagcggccactggctgtgctgtagggcgccatccgactcggctccgggctgctcgccctgcactggcggcctcccagccaacatccagctggacattgatggggaccgtgagacggagcgtatctactccctcttcaacttgtacatgagcaagctggagaagatgcaggaggcctgtgggagcaaatctgtgtatgacggcccggagcaggaggagtattcgacgttcgtcattgacgacccccaggagacctacaagacgctaaagcaagtcatccgctgggttggggctttggagcaggagcacgcccagtataagagggacaagttcaagaagacgaaatatggaagccaggagcaccccatcggagacaagagcttccagaactacatccggcagcagtccgagacctccactcattccatttaaagtctgcgggacgcgccc

SEQ ID NO: 487 - protein, 834 aa, Homo sapien
MAVEDEGLRVFQSVKIKIGEAKNLPSYPGPSKMRDCYCTVNLDQEEVFRTKIVEKSLCPFYGEDFYCEIPRSFRHLSFYIFDRDVFRRDSIIGKVAIQKEDLQKYHNRDTWFQLQHVDADSEVQGKVHLELRLSEVITDTGVVCHKLATRIVECQGLPIVNGQCDPYATVTLAGPFRSEAKKTKVKRKTNNPQFDEVFYFEVTRPCSYSKKSHFDFEEEDVDKLEIRVDLWNASNLKFGDEFLGELRIPLKVLRQSSSYEAWYFLQPRDNGSKSLKPDDLGSLRLNVVYTEDHVFSSDYYSPLRDLLLKSADVEPVSASAAHILGEVCREKQEAAVPLVRLFLHYGRVVPFISAIASAEVKRTQDPNTIFRGNSLASKCIDETMKLAGMHYLHVTLKPAIEEICQSHKPCEIDPVKLKDGENLENNMENLRQYVDRVFHAITESGVSCPTVMCDIFFSLREAAAKRFQDDPDVRYTAVSSFIFLRFFAPAILSPNLFQLTPHHTDPQTSRTLTLISKTVQTLGSLSKSKSASFKESYMATFYEFFNEQKYADAVKNFLDLISSSGRRDPKSVEQPIVLKEGFMIKRAQGRKRFGMKNFKKRWFRLTNHEFTYHKSKGDQPLYSIPIENILAVEKLEEESFKMKNMFQVIQPERALYIQANNCVEAKDWIDILTKVSQCNQKRLTVYHPSAYLSGHWLCCRAPSDSAPGCSPCTGGLPANIQLDIDGDRETERIYSLFNLYMSKLEKMQEACGSKSVYDGPEQEEYSTFVIDDPQETYKTLKQVIRWVGALEQEHAQYKRDKFKKTKYGSQEHPIGDKSFQNYIRQQSETSTHSI

SEQ ID NO: 488 - DNA, 2801 bp, Homo sapien
gcagtgtctcccggtcgcgcgtggaggtcggtcgctcagagctgctgggcgcagtttctccgcctgctgcttcggcgcggctgtatcggcgagcgagcgagttcccgcgagttctcggtggcgctcccccttcctttcagtctccacggactggcccctcgtccttctacttgaccgctcccgtcttccgccgccttctggcgctttccgttgggccgattcccgcccgcttcctcctgcttcccatcgaagctctagaaatgaatgtttccatctcttcagagatgaaccagattatgatgcatcattatcacagaagaaattcgtgtctatagcttttaaggacttgattacatcattttcaagcctgatagttttggaatcaccattagagcttaagacacacctgccttcatttcaaccacctgtcttcataccctgacgaagtgcaccttttaacactcctttgtccttggattacttaagagttcccagaaatacatttgccaccaacagagtagccaaatttataaggaaaaatgattcccaatggatatttgatgtttgaggatgaaaattttattgagtcttctgttgccaaattaaatgccctgaggaaaagtggccagttctgtgatgttcgacttcaggtctgtggccatgaaatgttagcacacagagcagtgctagcttgctgcagtccctatttatttgaaatctttaatagtgatagtgatcctcatggaatttctcacgttaaatttgatgatctcaatccagaagctgttgaagtcttgttgaattatgcctacactgctcagttgaaagcagataagaattgtaaagatgtttattctgcagcaaaaaagctgaagatggatcgagtaaagcaggtttgtggtgattatttactgtctagaatggatgttaccagctgcatctcttaccgaaattttgcaagttgtatgggagactcccgtttgttgaataaggttgatgcttatattcaggagcatttgttacaaatttctgaagaggaggagtttcttaagcttccaaggctaaagttggaggtaatgcttgaagataatgtttgcttgcccagcaatggcaaattatatacaaaggtaatcaactgggtgcagcgtagcatctgggagaatggagacagtctggaagagctgatggaagaggttcaaaccttgtactactcagctgatcacaagctgcttgatgggaacctactagatggacaggctgaggtgtttggcagtgatgatgaccacattcagtttgtgcagaaaaagccaccacgtgagaatggccataagcagataagtagcagttcaactggatgtctctcttctccaaatgctacagtacaaagccctaagcatgagtggaaaatcgttgcttcagaaaagacttcaaataacacttacttgtgcctggctgtgctggatggtatattctgtgtcatttttcttcatgggagaaacagcccacagagctcaccaacaagtactccaaaactaagtaagagtttaagctttgagatgcaacaagatgagctaatcgaaaagcccatgtctcctatgcagtacgcacgatctggtctgggaacagcagagatgaatggcaaactcatagctgcaggtggctataacagagaggaatgtcttcgaacagtcgaatgctataatccacatacagatcactggtcctttcttgctcccatgagaacaccaagagcccgatttcaaatggctgtactcatgggccagctctatgtggtaggtggatcaaatggccactcagatgacctgagttgtggagagatgtatgattcaaacatagatgactggattcctgttccagaattgagaactaaccgttgtaatgcaggagtgtgtgctctgaatggaaagttatacatcgttggtggctctgatccatatggtcaaaaaggactgaaaaattgtgatgtatttgatcctgtaacaaagttgtggacaagctgtgcccctcttaacattcggagacaccagtctgcagtctgtgagcttggtggttatttgtacataatcggaggtgcagaatcttggaattgtctgaacacagtagaacgatacaatcctgaaaataatacctggactttaattgcacccatgaatgtggctaggcgaggagctggagtggctgttcttaatggaaaactgtttgtatgtggtggctttgatggttctcatgccatcagttgtgtggaaatgtatgatccaactagaaatgaatggaagatgatgggaaatatgacttcaccaaggagcaatgctgggattgcaactgtagggaacaccatttatgcagtgggaggattcgatggcaatgaatttctgaatacggtggaagtctataaccttgagtcaaatgaatggagcccctatacaaagattttccagttttaacaaatttaagaccctctcaaactaacaggcttagtgatgtaattatggttagtagaggtacacttgtgaataaagagggtgggtgggtatagatgttgctaacagcaacacaaagcttttgcatattgcatactattaaacatgctgtacatactttttgggtttatttggaaaggaatgcaaagatgaaggtctgttttgtgtacttttaagactttggttattttactttttggaaaagaataaaccaagaattgattgggcacatcatttcaagaagtccctctcctccacatttgttttgccaatttgcacattaatgactcttcccctcgt

SEQ ID NO: 489 - protein, 641 aa, Homo sapien
MIPNGYLMFEDENFIESSVAKLNALRKSGQFCDVRLQVCGHEMLAHRAVLACCSPYLFEIFNSDSDPHGISHVKFDDLNPEAVEVLLNYAYTAQLKADKNCKDVYSAAKKLKMDRVKQVCGDYLLSRMDVTSCISYRNFASCMGDSRLLNKVDAYIQEHLLQISEEEEFLKLPRLKLEVMLEDNVCLPSNGKLYTKVINWVQRSIWENGDSLEELMEEVQTLYYSADHKLLDGNLLDGQAEVFGSDDDHIQFVQKKPPRENGHKQISSSSTGCLSSPNATVQSPKHEWKIVASEKTSNNTYLCLAVLDGIFCVIFLHGRNSPQSSPTSTPKLSKSLSFEMQQDELIEKPMSPMQYARSGLGTAEMNGKLIAAGGYNREECLRTVECYNPHTDHWSFLAPMRTPRARFQMAVLMGQLYVVGGSNGHSDDLSCGEMYDSNIDDWIPVPELRTNRCNAGVCALNGKLYIVGGSDPYGQKGLKNCDVFDPVTKLWTSCAPLNIRRHQSAVCELGGYLYIIGGAESWNCLNTVERYNPENNTWTLIAPMNVARRGAGVAVLNGKLFVCGGFDGSHAISCVEMYDPTRNEWKMMGNMTSPRSNAGIATVGNTIYAVGGFDGNEFLNTVEVYNLESNEWSPYTKIFQF

SEQ ID NO: 490 - DNA, 6942 bp, Homo sapien
ggcatggaacctaaagactagaggcggttgtgtgagtcaggaagaggggccagatatctgagtgttcctctttagtttcttcaattgcagataatatggtgtctaattttatgttgttcaggaaagacagtggttcctgactcaggaagacagtctcagaaacatgtggaatgatattgagctgctaacaaatgatgataccggaagtgggtacctgagtgtcggttcaagaaaagaacatggaactgctttatatcaagtagatttgctagtgaagatctcttctgaaaaggcctcattaaatccaaagatacaggcatgcagcttaagtgatgggtttattattgtagccgaccaatcagtgatattgcttgacagtatttgtagatcacttcaattgcatcttgtctttgatactgaagtggatgtagttggcctttgtcaagaaggaaagtttcttttggttggcgagagaagtggcaacctacatcttattcatgtaacatcaaaacaaacactactcactaatgcatttgttcagaaagctaacgatgaaaatcggcggacttaccagaatcttgtcattgagaaggatggttcaaatgaaggtacctattatatgctacttcttacatacagtggatttttttgtattacaaaccttcagcttttaaaaattcaacaagcaattgagaatgtagacttcagtacagcaaaaaagttacaaggacaaatcaagtccagttttatttctactgaaaattatcatactcttggttgtctcagtcttgtggctggagatttagcaagtgaagttcctgtgataattgggggaaccggtaattgtgcattctcaaaatgggaaccagattcttccaagaaaggaatgacagttaagaaccttattgatgcagagattattaaaggtgcaaagaagttccagctgatagacaatctactttttgttcttgatactgataacgtgctgagtttatgggatatttacactctaactcctgtatggaactggccctctcttcacgtagaagagtttcttcttactacagaagcagactctccttcatcagtcacgtggcaaggaattacaaatctcaaattaatagctctgacagcttcagctaataagaagatgaaaaacctcatggtttattcattacctacaatggaaatactatattctttggaagtatctagtgtttcttctctggtccaaacaggaattagcacagataccatataccttttagaaggagtttgcaaaaatgatccaaaattgtctgaagactcagtctctgtgttagtactcagatgtcttacggaagctttaccagaaaacagattgagtcggttacttcacaaacacagatttgctgaagctgagagttttgccattcagtttggactagatgttgagcttgtttacaaggtcaagtcaaatcatatattggagaaactggcattgagttctgtggatgccagtgaacagaccgaatggcaacaacttgtagacgacgctaaggaaaatctacataagatccaggatgatgaatttgtggtgaattactgcctgaaagctcagtggataacctatgaaaccactcaagagatgctgaattatgccaaaaccaggcttttgaagaaagaagataaaactgctctcatttattctgatggcttgaaagaggtgctaagagctcatgcaaaattgactactttttatggagcatttggaccagaaaaattcagtggcagttcttggattgaatttctaaataatgaagatgatcttaaagatatttttttacagctaaaagaaggaaaccttgtttgtgcacagtatctttggcttcgacatcgggcaaactttgaaagcagatttgatgtgaaaatgctggagagcttgctcaactcaatgtctgcatcagtctctttgcaaaagctgtgtccatggtttaaaaatgatgtgattccatttgtaagaaggactgtgcctgaaggacagataattcttgcaaaatggttggaacaagcagccaggaaccttgaattaactgataaggcaaattggccagaaaatggacttcaattggcagagatattttttacagcagaaaaaacagacgagttgggattggcatcttcctggcattggatttccttgaaagattatcagaacacagaggaagtatgtcagctaaggactttggtaaataacttgcgagagttgatcacgttgcataggaagtacaactgcaaattagccctctctgattttgagaaggaaaatacaaccaccatagtgttccgaatgtttgataaagtgctggccccagagcttattccctccatcttagagaagtttataagagtttacatgagagaacatgacttgcaagaggaggaacttctcttgctgtacatagaggatttactgaatagatgcagctcaaagtccacatcactctttgaaacagcatgggaagcaaaggccatggcagtaatagcgtgtttatctgacacggacctcatatttgatgccgtgctcaagatcatgtatgcggcagtggttccttggagtgcagctgtggagcaactggtgaaacagcacctggaaatggaccatcccaaagtcaagttattacaggaaagttacaaactaatggagatgaaaaaacttttacgaggctatggaataagagaggtaaatctcttaaacaaggaaataatgagagtggttagatacattctcaaacaagatgtcccatcttctttagaagatgctttaaaggtagcccaagcgtttatgttatctgatgatgagatctacagtctaagaattattgacctgattgatagagaacagggtgaagactgtctccttctgttgaagtctttgcctcctgctgaagctgagaaaactgcagaaagagtcatcatatgggcacgactggcattacaagaagagccagatcattctaaagagggcaaggcctggagaatgtctgtagcgaagacatccgtggacattcttaagatactatgtgacattcagaaagacaatctgcagaagaaggacgaatgtgaagaaatgttgaaactatttaaagaggttgctagcttacaggagaactttgaggtctttctttcatttgaagattatagcaatagttccctggtagcagatctccgtgagcagcacattaaagctcacgaagttgcacaggcgaaacacaaacctgggagcaccccagagcccatagctgctgaggtgaggagcccaagcatggaatcaaagctgcacagacaggcactggccctgcagatgtccaaacaagagctggaggcagagctgaccttgagagccttaaaagatgggaacatcaaaacagcactgaaaaaatgcagcgacttgtttaagtatcactgcaatgctgacactgggaaattgctatttctgacatgtcagaagctttgtcagatgttggctgataatgtcccagtgacagtgcctgtgggactgaatcttccttccatgatacatgatctagcaagccaagctgccaccatttgcagtccagattttttactagatgctttagaactatgtaaacatactttaatggctgtagagctttccagacaatgccaaatggatgactgtggaatcctcatgaaagcttcttttgggacacataaagatccatatgaagagtggtcttacagtgacttcttcagtgaagatggaattgttcttgagtcacagatggtgcttccagtgatttatgaactgatttcatctcttgtgcctctagctgaaagcaagagatatcccttggagtctaccagtttgccatactgctcccttaatgaaggagatggccttgttttacctgttataaattccatctctgccctgcttcagaatcttcaggaatctagccagtgggagctagccctaagatttgtggttggttcatttggtacctgtcttcagcactctgtgtcaaacttcatgaatgccactttgagtgaaaagttatttggagagactacattagttaaatcaaggcatgttgttatggaattgaaagaaaaagctgttatatttatcagggaaaatgctacaacactactgcacaaagtatttaattgtcgcttggtagatcttgacctggcgttgggttactgcactctcttacctcaaaaagatgtgtttgaaaatctctggaagctcatagataaagcatggcagaattacgacaaaatcttggcaatatctctggtgggctctgagctggcaagtctctatcaggaaatagaaatggggcttaagttccgtgaactcagtactgatgcccagtggggcattcgtcttggtaaacttggtatttcttttcaaccagttttcaggcaacattttctcaccaagaaagacctcattaaagctcttgtggagaatatagatatggacacaagcctcattttggaatattgcagcacatttcagttggactgcgatgcagttcttcagctcttcattgaaacgctgctccacaacacaaatgccggccaaggccagggagatgcaagcatggactctgcaaagcggcggcatcccaaactcctggccaaagcccttgagatggttcctttactgacgagcacaaaagatttggtcatcagtcttagtggaatactacataagttggatccttatgactatgaaatgattgaagttgtcttgaaagttatagaacgagctgatgaaaagataaccaatattaatattaatcaggcattgagtattctgaaacatttgaagtcatacagaagaatttctcctcccgtggatctagaatatcagtatatgttggaacatgtcataactttgccatcagctgcccaaactagactgccttttcacctgatattctttggcacagcacagaacttctggaaaattctctctacagaactcagtgaagaatctttcccaacattgctcttaatttcgaaattaatgaagttctctctggacactctgtacgtgtctacagcaaaacacgttttcgaaaaaaaactgaagccaaagctcctgaagttaacacaagctaaatcctcaacactgattaacaaggaaataactaagatcacgcagaccatcgaatcctgcttactctctatagtcaacccagagtgggctgtagctattgccatcagccttgcccaggatatccctgaaggttccttcaagatatctgctttgaaattctgcctttatttagctgagagatggctacagaatatcccatcgcaggacgaaaaacgtgaaaaagccgaggctttgttgaagaagcttcatatccagtaccggcgatcgggcacagaagctgtgctcatagcccacaagctgaacactgaggaatatttaagagtgatcggaaagccagcacatcttattgtcagtctctacgaacatcctagcatcaatcaaagaattcagaattcatctggcacagattatcctgatattcatgcagcagctaaagaaatagccgaagtcaatgaaattaatttggaaaaagtctgggacatgttgttggaaaaatggctatgcccttcaacaaaacctggtgaaaaaccatcagaattatttgaacttcaagaagatgaagccctacgaagagtgcagtatctcctcctgtctcgtccaattgattatagttcaagaatgctgtttgtatttgcaacatcaactacaaccacattaggtatgcatcagttaacttttgcccatagaactcgagctcttcagtgtctcttctatttggctgacaaggaaactatagaatctctctttaaaaaacccattgaagaagtgaaatcttatttgagatgtataacttttctggcatcatttgagactttgaatatccccatcacatatgaattattttgcagcagtcctaaagaaggaatgattaagggtctgtggaaaaaccacagccacgagtccatggcagtaagattggtgactgagctgtgtttagaatacaaaatctatgacctgcagctttggaatggactcttgcaaaagcttctgggcttcaatatgattccttatctaaggaaagttttaaaagccatctccagtatccattctttatggcaggttccctacttcagcaaagcgtggcagcgtgtgatacagataccactgctttcagcctcttgtcctttaagtcctgatcagctgtcagattgttctgagagtctcatcgctgtcctcgaatgtccagtctcaggtgatcttgacctgatcggagtcgccaggcagtatatccagttagaacttccggcttttgcattagcttgtctgatgctcatgccccactcagagaaaagacaccagcaaattaagaattttctgggttcctgtgaccctcaggttattttaaagcaattggaagagcatatgaacacgggccagctagcaggattttcacatcaaattagaagtctgattttgaataatatcatcaataagaaggagtttgggattttggcaaagaccaaatactttcaaatgttgaagatgcatgcgatgaataccaacaatatcactgagctagtgaactatttggcaaatgacttaagtttagatgaagcttcagtcttgataactgaatattcaaagcactgcgggaaacctgtgcctccagacactgctccctgtgaaattctgaagatgtttcttagtggattatcgtaaatcactgaacctttttttcaagaaggacaagaattttggagtctgctattaatggaccatatttattacagtttttaaattgtacaatctctgtattatagctatttgtctaacattaccccacatgtaataaataaaacaatatgagc

SEQ ID NO: 491 - protein, 2000 aa, Homo sapien
MWNDIELLTNDDTGSGYLSVGSRKEHGTALYQVDLLVKISSEKASLNPKIQACSLSDGFIIVADQSVILLDSICRSLQLHLVFDTEVDVVGLCQEGKFLLVGERSGNLHLIHVTSKQTLLTNAFVQKANDENRRTYQNLVIEKDGSNEGTYYMLLLTYSGFFCITNLQLLKIQQAIENVDFSTAKKLQGQIKSSFISTENYHTLGCLSLVAGDLASEVPVIIGGTGNCAFSKWEPDSSKKGMTVKNLIDAEIIKGAKKFQLIDNLLFVLDTDNVLSLWDIYTLTPVWNWPSLHVEEFLLTTEADSPSSVTWQGITNLKLIALTASANKKMKNLMVYSLPTMEILYSLEVSSVSSLVQTGISTDTIYLLEGVCKNDPKLSEDSVSVLVLRCLTEALPENRLSRLLHKHRFAEAESFAIQFGLDVELVYKVKSNHILEKLALSSVDASEQTEWQQLVDDAKENLHKIQDDEFVVNYCLKAQWITYETTQEMLNYAKTRLLKKEDKTALIYSDGLKEVLRAHAKLTTFYGAFGPEKFSGSSWIEFLNNEDDLKDIFLQLKEGNLVCAQYLWLRHRANFESRFDVKMLESLLNSMSASVSLQKLCPWFKNDVIPFVRRTVPEGQIILAKWLEQAARNLELTDKANWPENGLQLAEIFFTAEKTDELGLASSWHWISLKDYQNTEEVCQLRTLVNNLRELITLHRKYNCKLALSDFEKENTTTIVFRMFDKVLAPELIPSILEKFIRVYMREHDLQEEELLLLYIEDLLNRCSSKSTSLFETAWEAKAMAVIACLSDTDLIFDAVLKIMYAAVVPWSAAVEQLVKQHLEMDHPKVKLLQESYKLMEMKKLLRGYGIREVNLLNKEIMRVVRYILKQDVPSSLEDALKVAQAFMLSDDEIYSLRIIDLIDREQGEDCLLLLKSLPPAEAEKTAERVIIWARLALQEEPDHSKEGKAWRMSVAKTSVDILKILCDIQKDNLQKKDECEEMLKLFKEVASLQENFEVFLSFEDYSNSSLVADLREQHIKAHEVAQAKHKPGSTPEPIAAEVRSPSMESKLHRQALALQMSKQELEAELTLRALKDGNIKTALKKCSDLFKYHCNADTGKLLFLTCQKLCQMLADNVPVTVPVGLNLPSMIHDLASQAATICSPDFLLDALELCKHTLMAVELSRQCQMDDCGILMKASFGTHKDPYEEWSYSDFFSEDGIVLESQMVLPVIYELISSLVPLAESKRYPLESTSLPYCSLNEGDGLVLPVINSISALLQNLQESSQWELALRFVVGSFGTCLQHSVSNFMNATLSEKLFGETTLVKSRHVVMELKEKAVIFIRENATTLLHKVFNCRLVDLDLALGYCTLLPQKDVFENLWKLIDKAWQNYDKILAISLVGSELASLYQEIEMGLKFRELSTDAQWGIRLGKLGISFQPVFRQHFLTKKDLIKALVENIDMDTSLILEYCSTFQLDCDAVLQLFIETLLHNTNAGQGQGDASMDSAKRRHPKLLAKALEMVPLLTSTKDLVISLSGILHKLDPYDYEMIEVVLKVIERADEKITNININQALSILKHLKSYRRISPPVDLEYQYMLEHVITLPSAAQTRLPFHLIFFGTAQNFWKILSTELSEESFPTLLLISKLMKFSLDTLYVSTAKHVFEKKLKPKLLKLTQAKSSTLINKEITKITQTIESCLLSIVNPEWAVAIAISLAQDIPEGSFKISALKFCLYLAERWLQNIPSQDEKREKAEALLKKLHIQYRRSGTEAVLIAHKLNTEEYLRVIGKPAHLIVSLYEHPSINQRIQNSSGTDYPDIHAAAKEIAEVNEINLEKVWDMLLEKWLCPSTKPGEKPSELFELQEDEALRRVQYLLLSRPIDYSSRMLFVFATSTTTTLGMHQLTFAHRTRALQCLFYLADKETIESLFKKPIEEVKSYLRCITFLASFETLNIPITYELFCSSPKEGMIKGLWKNHSHESMAVRLVTELCLEYKIYDLQLWNGLLQKLLGFNMIPYLRKVLK

SEQ ID NO: 492 - DNA, 2308 bp, Homo sapien
gagagactggatggacccacaagggtgacagcccaggcggaccgatcttcccatcccacatcctccggcgcgatgccaaaaagaggctgacggcaactgggccttctgcagagaaagacctccgcttcactgccccggctggtcccaagggtcaggaagatggattcatacctgctgatgtggggactgctcacgttcatcatggtgcctggctgccaggcagagctctgtgacgatgacccgccagagatcccacacgccacattcaaagccatggcctacaaggaaggaaccatgttgaactgtgaatgcaagagaggtttccgcagaataaaaagcgggtcactctatatgctctgtacaggaaactctagccactcgtcctgggacaaccaatgtcaatgcacaagctctgccactcggaacacaacgaaacaagtgacacctcaacctgaagaacagaaagaaaggaaaaccacagaaatgcaaagtccaatgcagccagtggaccaagcgagccttccaggtcactgcagggaacctccaccatgggaaaatgaagccacagagagaatttatcatttcgtggtggggcagatggtttattatcagtgcgtccagggatacagggctctacacagaggtcctgctgagagcgtctgcaaaatgacccacgggaagacaaggtggacccagccccagctcatatgcacaggtgaaatggagaccagtcagtttccaggtgaagagaagcctcaggcaagccccgaaggccgtcctgagagtgagacttcctgcctcgtcacaacaacagattttcaaatacagacagaaatggctgcaaccatggagacgtccatatttacaacagagtaccaggtagcagtggccggctgtgttttcctgctgatcagcgtcctcctcctgagtgggctcacctggcagcggagacagaggaagagtagaagaacaatctagaaaaccaaaagaacaagaatttcttggtaagaagccgggaacagacaacagaagtcatgaagcccaagtgaaatcaaaggtgctaaatggtcgcccaggagacatccgttgtgcttgcctgcgttttggaagctctgaagtcacatcacaggacacggggcagtggcaaccttgtctctatgccagctcagtcccatcagagagcgagcgctacccacttctaaatagcaatttcgccgttgaagaggaagggcaaaaccactagaactctccatcttattttcatgtatatgtgttcattaaagcatgaatggtatggaactctctccaccctatatgtagtataaagaaaagtaggtttacattcatctcattccaacttcccagttcaggagtcccaaggaaagccccagcactaacgtaaatacacaacacacacactctaccctatacaactggacattgtctgcgtggttcctttctcagccgcttctgactgctgattctcccgttcacgttgcctaataaacatccttcaagaactctgggctgctacccagaaatcattttacccttggctcaatcctctaagctaacccccttctactgagccttcagtcttgaatttctaaaaaacagaggccatggcagaataatctttgggtaacttcaaaacggggcagccaaacccatgaggcaatgtcaggaacagaaggatgaatgaggtcccaggcagagaatcatacttagcaaagttttacctgtgcgttactaattggcctctttaagagttagtttctttgggattgctatgaatgataccctgaatttggcctgcactaatttgatgtttacaggtggacacacaaggtgcaaatcaatgcgtacgtttcctgagaagtgtctaaaaacaccaaaaagggatccgtacattcaatgtttatgcaaggaaggaaagaaagaaggaagtgaagagggagaagggatggaggtcacactggtagaacgtaaccacggaaaagagcgcatcaggcctggcacggtggctcaggcctataaccccagctccctaggagaccaaggcgggagcatctcttgaggccaggagtttgagaccagcctgggcagcatagcaagacacatccctacaaaaaattagaaattggctggatgtggtggcatacgcctgtagtcctagccactcaggaggctgaggcaggaggattgcttgagcccaggagttcgaggctgcagtcagtcatgatggcaccactgcactccagcctgggcaacagagcaagatcctgtctttaaggaaaaaaagacaagg

SEQ ID NO: 493 - protein, 272 aa, Homo sapien
MDSYLLMWGLLTFIMVPGCQAELCDDDPPEIPHATFKAMAYKEGTMLNCECKRGFRRIKSGSLYMLCTGNSSHSSWDNQCQCTSSATRNTTKQVTPQPEEQKERKTTEMQSPMQPVDQASLPGHCREPPPWENEATERIYHFVVGQMVYYQCVQGYRALHRGPAESVCKMTHGKTRWTQPQLICTGEMETSQFPGEEKPQASPEGRPESETSCLVTTTDFQIQTEMAATMETSIFTTEYQVAVAGCVFLLISVLLLSGLTWQRRQRKSRRTI

SEQ ID NO: 494 - DNA, 1222 bp, Homo sapien
agctcagcaggacctcagccatgagacttctcatcctggccctccttggcatctgctctctcactgcatacattgtggaaggtgtagggagtgaagtctcagataagaggacctgtgtgagcctcactacccagcgactgccggttagcagaatcaagacctacaccatcacggaaggctccttgagagcagtaatttttattaccaaacgtggcctaaaagtctgtgctgatccacaagccacatgggtgagagacgtggtcaggagcatggacaggaaatccaacaccagaaataacatgatccagaccaagccaacaggaacccagcaatcgaccaatacagctgtgactctgactggctagtagtctctggcaccctgtccgtctccagccagccagctcatttcactttacacgctcatggactgagtttatactcaccttttatgaaagcactgcatgaataaaattattcctttgtatttttacttttaaatgtcttctgtattcacttatatgttctaattaataaattatttattattaagaatagttccctagtctattcattatatttagggaaaggtagtgtatcattgttgtttgatttctgaccttgtacctctctttgatggtaaccataatggaagagattctggctagtgtctatcagaggtgaaagctatatcaatctctcttagagtccagcttgtaatggttctttacacatcagtcacaagttacagctgtgacaatggcaacaatttgagatgtatttcaacttgtctctataatagaattctgtttatagaataagggagaaaataatccagtcttcactgggttcccattctgagggtccactactcaaaaatttgcttcactcaatttttttcacctctttgtgttttattttggtgtcctattaaaggaataaaatgacacaacttgtcccttttttgtcccattagcaaaaattagaattttggtataaagaaactttattcaagtaaaaatcaataccctttgaattggacaataatctcactaccttattaggatttctgtatttgccattacgctagttatcatgcatgttatgctttactgcgaataagcttttaatgctccaaatgctgacccatgcaatatttcctcatgtgatcacaatttgcagtaaacttttaattaaatgctcatctggtaactcaacaccccag

SEQ ID NO: 495 - protein, 114 aa, Homo sapien
MRLLILALLGICSLTAYIVEGVGSEVSDKRTCVSLTTQRLPVSRIKTYTITEGSLRAVIFITKRGLKVCADPQATWVRDVVRSMDRKSNTRNNMIQTKPTGTQQSTNTAVTLTG

SEQ ID NO: 496 - DNA, 6513 bp, Homo sapien
attgctaagccatccttcagacagagagggagcggctgcaagaggtaatgagagatggcaagaaagaagctgaaaaaatttactactttggagattgtgctcagtgttcttctgcttgtgttgtttatcatcagtattgttctaattgtgcttttagccaaagagtcactgaaatcaacagccccagatcctgggacaactggtaccccggatcctgggacaactggtaccccagatcctggaacaactggtaccacacatgctaggacaacgggtcccccagatcctggaacaactggtaccactcctgtttctgctgaatgtccagtggtaaatgaattggaacgaattaattgcatccctgaccagccgccaacaaaggccacatgtgaccaacgtggctgttgctggaatccccagggagctgtaagtgttccctggtgctactattccaagaatcatagctaccatgtagagggcaaccttgtcaacacaaatgcaggattcacagcccggttgaaaaatctgccttcctcaccagtgtttggaagcaatgttgacaatgttcttctcacagcagaatatcagacatctaatcgtttccactttaagttgactgaccaaaccaataacaggtttgaagtgccccacgaacacgtgcagtccttcagtggaaatgctgctgcttctttgacctaccaagttgaaatctccagacagccatttagcatcaaagtgaccagaagaagcaacaatcgtgttttgtttgactcgagcattgggcccctactgtttgctgaccagttcttgcagctctccactcgactgcctagcactaacgtgtatggcctgggagagcatgtgcaccagcagtatcggcatgatatgaattggaagacctggcccatatttaacagagacacaactcccaatggaaacggaactaatttgtatggtgcgcagacattcttcttgtgccttgaagatgctagtggattgtcctttggggtgtttctgatgaacagcaatgccatggaggttgtccttcagcctgcgccagccatcacttaccgcaccattgggggcattctcgacttctatgtgttcttgggaaacactccagagcaagttgttcaagaatatctagagctcattgggcggccagcccttccctcctactgggcgcttggatttcacctcagtcgttacgaatatggaaccttagacaacatgagggaagtcgtggagagaaatcgcgcagcacagctcccttatgatgttcagcatgctgatattgattatatggatgagagaagggacttcacttatgattcagtggattttaaaggcttccctgaatttgtcaacgagttacacaataatggacagaagcttgtcatcattgtggatccagccatctccaacaactcttcctcaagtaaaccctatggcccatatgacaggggttcggatatgaagatatgggtgaatagttcagatggagtgactccactcattggggaggtctggcctggacaaactgtgtttcctgattataccaatcccaactgtgctgtttggtggacaaaggaatttgagctttttcacaatcaagtagagtttgatggaatctggattgatatgaatgaagtctccaactttgttgatggttcggtctcaggatgttccacaaacaacctaaataatcccccattcactcccagaatcctggatgggtacctgttctgcaagactctctgtatggatgcagtgcagcactggggcaagcagtatgacattcacaatctgtatggctactccatggcggtcgccacagcagaagctgccaagactgtgttccctaataagagaagcttcattctgacccgttctacctttgcgggctctggcaagtttgcagcacattggttaggagacaacactgccacctgggatgacctgagatggtccatccctggcgtgcttgagttcaacctttttggcatcccaatggtgggtcctgacatatgtggctttgctttggacacccctgaggagctctgtaggcggtggatgcagttgggtgcattttatccgttttctagaaatcacaatggccaaggctacaaggaccaggatcctgcctcctttggagctgactccctgctgttgaattcctccaggcactaccttaacatccgctatactctattgccctacctatacacccttttcttccgtgctcacagccgaggggacacggtggccaggccccttttgcatgagttctacgaggacaacagcacttgggatgtgcaccaacagttcttatgggggcccggcctcctcatcactccagttctggatgaaggtgcagagaaagcgatggcatatgtgcctgatgctgtctggtatgactacgagactgggagccaagtgagatggaggaagcaaaaagtcgagatggaacttcctggagacaaaattggacttcaccttcgaggaggctacatcttccccacacagcagccaaatacaaccactctggccagtcgaaagaaccctcttggtcttatcattgccctagatgagaacaaagaagcaaaaggagaacttttctgggatgatggggaaacgaaggatactgtggccaataaagtgtatcttttatgtgagttttctgtcactcaaaaccgcttggaggtgaatatttcacaatcaacctacaaggaccccaataatttagcatttaatgagattaaaattcttgggacggaggaacctagcaatgttacagtgaaacacaatggtgtcccaagtcagacttctcctacagtcacttatgattctaacctgaaggttgccattatcacagatattgatcttctcctgggagaagcatacacagtggaatggagcataaagataagggatgaagaaaaaatagactgttaccctgatgagaatggtgcttctgccgaaaactgcactgcccgtggctgtatctgggaggcatccaattcttctggagtccctttttgctattttgtcaacgacctatactctgtcagtgatgttcagtataattcccatggggccacagctgacatctccttaaagtcttccgtttatgccaatgccttcccctccacacccgtgaacccccttcgcctggatgtcacttaccataagaatgaaatgccgcagttcaagatttatgatcccaacaagaatcggtatgaagttccagtccctctgaacatacccagcatgccatccagcacccctgagggtcaactctatgatgtgctcattaagaagaatccatttgggattgaaattcgccggaagagtataggcactataatttgggactctcagctccttggctttaccttcagtgacatgtttatccgcatctccacccgccttccctccaagtacctctatggcttcggggaaactgagcacaggtcctataggagagacttggagtggcacacttgggggatgttctcccgagaccagcccccagggtacaagaagaattcctatggtgtccacccctactacatggggctggaggaggacggcagtgcccatggagtgctcctgctgaacagcaatgccatggatgtgacgttccagcccctgcctgccttgacataccgcaccacagggggagttctggacttttatgtgttcttggggccgactccagagcttgtcacccagcagtacactgagttgattggccggcctgtgatggtaccttactggtctttggggttccagctgtgtcgctatggctaccagaatgactctgagatcgccagcttgtatgatgagatggtggctgcccagatcccttatgatgtgcagtactcagacatcgactacatggagcggcagctggacttcaccctcagccccaagtttgctgggtttccagctctgatcaatcgcatgaaggctgatgggatgcgggtcatcctcattctggatccagccatttctggcaatgagacacagccttatcctgccttcactcggggcgtggaggatgacgtcttcatcaaatacccaaatgatggagacattgtctggggaaaggtctggcctgattttcctgatgttgttgtgaatgggtctctagactgggacagccaagtggagctatatcgagcttatgtggccttcccagactttttccgtaattcaactgccaagtggtggaagagggaaatagaagaactatacaacaatccacagaatccagagaggagcttgaagtttgatggcatgtggattgatatgaatgaaccatcaagcttcgtgaatggggcagtttctccaggctgcagggacgcctctctgaaccaccctccctacatgccacatttggagtccagggacaggggcctgagcagcaagaccctttgtatggagagtcagcagatcctcccagacggctccctggtgcagcactacaacgtgcacaacctgtatgggtggtcccagaccagacccacatacgaagccgtgcaggaggtgacgggacagcgaggggtcgtcatcacccgctccacatttccctcttctggccgctgggcaggacattggctgggagacaacacggccgcatgggatcagctgaagaagtctatcattggcatgacggagttcagcctcttcggcatatcctatacgggagcagatatctgtgggttctttcaagatgctgaatatgagatgtgtgttcgctggatgcagctgggggccttttaccccttctcaagaaaccacaacaccattgggaccaggagacaagaccctgtgtcctgggatgttgcttttgtgaatatttccagaactgtcctgcagaccagatgcaccctgttgccatatctgtataccttgatgcataaggcccacacggagggcgtcactgttgtgcggcctctgctccatgaatttgtgtcagaccaggtgacatgggacatagacagtcagttcctgctgggcccagccttcctggtcagccctgtcctggagcgtaatgccagaaatgtcactgcatatttccctagagcccgctggtatgattactacacgggtgtggatattaatgcaagaggagagtggaagaccttgccagcccctcttgaccacattaatcttcatgtccgtgggggctacatcctgccctggcaagagcctgcactgaacacccacttaagccgccagaaattcatgggcttcaaaattgccttggatgatgaaggaactgctgggggctggctcttctgggatgatgggcaaagcattgatacctatgggaaaggactctattacttggccagcttttctgccagccagaatacgatgcaaagccatataattttcaacaattacatcactggtacaaatcctttgaaactgggctacattgaaatctggggagtgggcagtgtccccgttaccagtgccagcatctctgtgagtggcatggtcataacaccctccttcaacaatgaccccacgacacaggtattaagcatcgatgtgactgacagaaacatcagcctacataattttacttcattgacgtggataagcactctgtgaatttttacagcaagattctaactaactatgaatgactttgaaactacttatacttcatactcataaaaattattgtgtgttgctaatttgttcatacccactattggtgaaatatttctgttaattttgttatatgttttttgtgtgaaccctaaaggttaaaccttagccctgtgggataggcagttagggaggtgtggaaaatctatgcattaccttaatgtctctgtgtggttagtatggtagtgactgttcatcatatgacatttactgaagatgaactgggtccatgatgaagtgtgtgtatgtccacgtttgtaatcatagaatggaccccattcttttgttaaatacacaagagaaagctttctgtgacagttccaggtcttgaagctaatcagcatctcaagaaagtatccagaaagaacatctgctagttggttataggcggtgggaggaataatatacctaattggttataggtggggggagcatgataagcaaagaaaaggcaaacacaaggaaagatcagatgaaacagaagatgatagtaaaagtgatcctaagtaagaacataatgtaaaattgtcagcagcctcatggggaggaaaaaggaagagtcaactcacttgaagaagagggtcttgagaaatccttagcataaagggctactggtgagattgagatctgagcaggcaaagctcaaaagagagtttggaggttaaaaataatttatttttgcagtagtgtgctttgaaatgtgtaaatcttatttctaatgtatacaaccacatttcacataaaaatatgcaatttatatgccagataaaaataaaacaagtgaatttgcaagtgaaaaaaaaaaaaaaaaaaaaaaaaaaaaaa

SEQ ID NO: 497 - protein, 1857 aa, Homo sapien
MARKKLKKFTTLEIVLSVLLLVLFIISIVLIVLLAKESLKSTAPDPGTTGTPDPGTTGTPDPGTTGTTHARTTGPPDPGTTGTTPVSAECPVVNELERINCIPDQPPTKATCDQRGCCWNPQGAVSVPWCYYSKNHSYHVEGNLVNTNAGFTARLKNLPSSPVFGSNVDNVLLTAEYQTSNRFHFKLTDQTNNRFEVPHEHVQSFSGNAAASLTYQVEISRQPFSIKVTRRSNNRVLFDSSIGPLLFADQFLQLSTRLPSTNVYGLGEHVHQQYRHDMNWKTWPIFNRDTTPNGNGTNLYGAQTFFLCLEDASGLSFGVFLMNSNAMEVVLQPAPAITYRTIGGILDFYVFLGNTPEQVVQEYLELIGRPALPSYWALGFHLSRYEYGTLDNMREVVERNRAAQLPYDVQHADIDYMDERRDFTYDSVDFKGFPEFVNELHNNGQKLVIIVDPAISNNSSSSKPYGPYDRGSDMKIWVNSSDGVTPLIGEVWPGQTVFPDYTNPNCAVWWTKEFELFHNQVEFDGIWIDMNEVSNFVDGSVSGCSTNNLNNPPFTPRILDGYLFCKTLCMDAVQHWGKQYDIHNLYGYSMAVATAEAAKTVFPNKRSFILTRSTFAGSGKFAAHWLGDNTATWDDLRWSIPGVLEFNLFGIPMVGPDICGFALDTPEELCRRWMQLGAFYPFSRNHNGQGYKDQDPASFGADSLLLNSSRHYLNIRYTLLPYLYTLFFRAHSRGDTVARPLLHEFYEDNSTWDVHQQFLWGPGLLITPVLDEGAEKAMAYVPDAVWYDYETGSQVRWRKQKVEMELPGDKIGLHLRGGYIFPTQQPNTTTLASRKNPLGLIIALDENKEAKGELFWDDGETKDTVANKVYLLCEFSVTQNRLEVNISQSTYKDPNNLAFNEIKILGTEEPSNVTVKHNGVPSQTSPTVTYDSNLKVAIITDIDLLLGEAYTVEWSIKIRDEEKIDCYPDENGASAENCTARGCIWEASNSSGVPFCYFVNDLYSVSDVQYNSHGATADISLKSSVYANAFPSTPVNPLRLDVTYHKNEMPQFKIYDPNKNRYEVPVPLNIPSMPSSTPEGQLYDVLIKKNPFGIEIRRKSIGTIIWDSQLLGFTFSDMFIRISTRLPSKYLYGFGETEHRSYRRDLEWHTWGMFSRDQPPGYKKNSYGVHPYYMGLEEDGSAHGVLLLNSNAMDVTFQPLPALTYRTTGGVLDFYVFLGPTPELVTQQYTELIGRPVMVPYWSLGFQLCRYGYQNDSEIASLYDEMVAAQIPYDVQYSDIDYMERQLDFTLSPKFAGFPALINRMKADGMRVILILDPAISGNETQPYPAFTRGVEDDVFIKYPNDGDIVWGKVWPDFPDVVVNGSLDWDSQVELYRAYVAFPDFFRNSTAKWWKREIEELYNNPQNPERSLKFDGMWIDMNEPSSFVNGAVSPGCRDASLNHPPYMPHLESRDRGLSSKTLCMESQQILPDGSLVQHYNVHNLYGWSQTRPTYEAVQEVTGQRGVVITRSTFPSSGRWAGHWLGDNTAAWDQLKKSIIGMTEFSLFGISYTGADICGFFQDAEYEMCVRWMQLGAFYPFSRNHNTIGTRRQDPVSWDVAFVNISRTVLQTRCTLLPYLYTLMHKAHTEGVTVVRPLLHEFVSDQVTWDIDSQFLLGPAFLVSPVLERNARNVTAYFPRARWYDYYTGVDINARGEWKTLPAPLDHINLHVRGGYILPWQEPALNTHLSRQKFMGFKIALDDEGTAGGWLFWDDGQSIDTYGKGLYYLASFSASQNTMQSHIIFNNYITGTNPLKLGYIEIWGVGSVPVTSASISVSGMVITPSFNNDPTTQVLSIDVTDRNISLHNFTSLTWISTL

SEQ ID NO: 498 - DNA, 2157 bp, Homo sapien
cgatcctgccggagccccgccgccgccggcttggattctgaaaccttccttgtatccctcctgagacatctttgctgcaagatcgaggctgtcctctggtgagaaggtggtgaggcttcccgtcatattccagctctgaacagcaacatggggtgcaaagtcctgctcaacattgggcagcagatgctgcggcggaaggtggtggactgtagccgggaggagacgcggctgtctcgctgcctgaacacttttgatctggtggccctcggggtgggcagcacactgggtgctggtgtctacgtcctggctggagctgtggcccgtgagaatgcaggccctgccattgtcatctccttcctgatcgctgcgctggcctcagtgctggctggcctgtgctatggcgagtttggtgctcgggtccccaagacgggctcagcttacctctacagctatgtcaccgttggagagctctgggccttcatcaccggctggaacttaatcctctcctacatcatcggtacttcaagcgtagcgagggcctggagcgccaccttcgacgagctgataggcagacccatcggggagttctcacggacacacatgactctgaacgcccccggcgtgctggctgaaaaccccgacatattcgcagtgatcataattctcatcttgacaggacttttaactcttggtgtgaaagagtcggccatggtcaacaaaatattcacttgtattaacgtcctggtcctgggcttcataatggtgtcaggatttgtgaaaggatcggttaaaaactggcagctcacggaggaggattttgggaacacatcaggccgtctctgtttgaacaatgacacaaaagaagggaagcccggtgttggtggattcatgcccttcgggttctctggtgtcctgtcgggggcagcgacttgcttctatgccttcgtgggctttgactgcatcgccaccacaggtgaagaggtgaagaacccacagaaggccatccccgtggggatcgtggcgtccctcttgatctgcttcatcgcctactttggggtgtcggctgccctcacgctcatgatgccctacttctgcctggacaataacagccccctgcccgacgcctttaagcacgtgggctgggaaggtgccaagtacgcagtggccgtgggctccctctgcgctctttccgccagtcttctaggttccatgtttcccatgcctcgggttatctatgccatggctgaggatggactgctatttaaattcttagccaacgtcaatgataggaccaaaacaccaataatcgccacattagcctcgggtgccgttgctgctgtgatggccttcctctttgacctgaaggacttggtggacctcatgtccattggcactctcctggcttactcgttggtggctgcctgtgtgttggtcttacggtaccagccagagcagcctaacctggtataccagatggccagtacttccgacgagttagatccagcagaccaaaatgaattggcaagcaccaatgattcccagctggggtttttaccagaggcagagatgttctctttgaaaaccatactctcacccaaaaacatggagccttccaaaatctctgggctaattgtgaacatttcaaccagccttatagctgttctcatcatcaccttctgcattgtgaccgtgcttggaagggaggctctcaccaaaggggcgctgtgggcagtctttctgctcgcagggtctgccctcctctgtgccgtggtcacgggcgtcatctggaggcagcccgagagcaagaccaagctctcatttaaggttcccttcctgccagtgctccccatcctgagcatcttcgtgaacgtctatctcatgatgcagctggaccagggcacctgggtccggtttgctgtgtggatgctgataggcttcatcatctactttggctatggcctgtggcacagcgaggaggcgtccctggatgccgaccaagcaaggactcctgacggcaacttggaccagtgcaagtgacgcacagccccgccccccggaggtggcagcagccccgagggacgcccccagaggaccgggaggcaccccaccctccccaccagtgcaacagaaaccacctgcgtccacaccctcactgca

SEQ ID NO: 499 - protein, 629 aa, Homo sapien
MGCKVLLNIGQQMLRRKVVDCSREETRLSRCLNTFDLVALGVGSTLGAGVYVLAGAVARENAGPAIVISFLIAALASVLAGLCYGEFGARVPKTGSAYLYSYVTVGELWAFITGWNLILSYIIGTSSVARAWSATFDELIGRPIGEFSRTHMTLNAPGVLAENPDIFAVIIILILTGLLTLGVKESAMVNKIFTCINVLVLGFIMVSGFVKGSVKNWQLTEEDFGNTSGRLCLNNDTKEGKPGVGGFMPFGFSGVLSGAATCFYAFVGFDCIATTGEEVKNPQKAIPVGIVASLLICFIAYFGVSAALTLMMPYFCLDNNSPLPDAFKHVGWEGAKYAVAVGSLCALSASLLGSMFPMPRVIYAMAEDGLLFKFLANVNDRTKTPIIATLASGAVAAVMAFLFDLKDLVDLMSIGTLLAYSLVAACVLVLRYQPEQPNLVYQMASTSDELDPADQNELASTNDSQLGFLPEAEMFSLKTILSPKNMEPSKISGLIVNISTSLIAVLIITFCIVTVLGREALTKGALWAVFLLAGSALLCAVVTGVIWRQPESKTKLSFKVPFLPVLPILSIFVNVYLMMQLDQGTWVRFAVWMLIGFIIYFGYGLWHSEEASLDADQARTPDGNLDQCK

SEQ ID NO: 500 - DNA, 2308 bp, Homo sapien
gttttcaggctcttggcggtgaaggtcagagtgcagacctgagaccactgctcaccgacttcagactccagtttatctgtgccccagcttcctcacttagtctcagaagacttaggctgaggcctcagaaggagatctccatcctttgtccagagcagaacaggatggccatgtcccaggaatcattgaccttcaaggacgtgtttgtggacttcaccctggaggagtggcagcaactggactctgcccagaagaacctctacagggatgtcatgcttgagaactacagccacctggtgtccgtggggtatctagttgcgaagcctgatgtgatcttcaggttgggaccaggtggagagtcctggatggcagatggggggaccccggtacggacctgtgcagaagtctggcaagttgatgagcagatagatcactacaaggaaagccaagacaaacttccttggcaagctgcattcataggcaaggaaacactgaaggatgaaagcggtcaagaatccagaacatgtagaaaaagcatttatctgagcacagaatttgattctgtaaggcaaagactccctaaatattattcgtgggaaaaggcattcaaaacatcatttaaactttcttggtcaaaatggaagctatgtaagaaagaaagatgatggatgtaaagcatattggaaagtatgcttccattataatcttcataaagctcaacctgcagagagattttttgaccctaatcaacgagggaaagccctccaccaaaagcaagcccttagaaaaagtcagagaagtcaaactggggagaaactctacaaatgtactgaatgtggaaaagtgtttatccagaaagcaaacttagttgtacatcaaagaactcacaccggagagaaaccttatgaatgctgcgaatgtgcaaaagccttcagccagaagtcaaccctcatagcacaccagagaactcacacaggggagaagccctatgaatgcagtgaatgtggaaaaacctttatccagaagtcaactctgattaaacataagaaaattcatatggagagagaccctataaatgcagtgtctgtgagaaagccttcagtaggaagtcaactctcattaaacatcagataattcatatgggagaaaccttatgaatgtaataaatgtgggaaatcttttagtgttaaatcaactctcattgtatgtcacagaacataaatgcataagttgcatgctattgtgaatagtgtgatgaaattttgcactgtcctgctctttcctgctcaggatgcaaatcagtgaatctttttttttttttttttttgagacagagtcttgctctgtcatccaaactggagtgcagtggcacaatcttggctcactgcaacctccgcctcttgggttcaaccgattctcctgcctcaacctcccaaatagttgggattacaggcacatgccaccatacgcagctaatttgtatttttagtagagacagggtttcaccatgttggccagcctggtcttgaactcctgacctcaagtgatccgcctgcctcagcctcccaaagtgctgggattacaggcatgagccactgcacccggcttgaatcatccttttgtccagtattatatccatgctgtatatgctacccgcccactagtcccttagctgtctcagttgtcagattgactgtcatgggattgcagtgcttgcattaaagctacccttattgtataatgaccccaaagtgcaagagtagtgatgttggcaatttgcatacaccaaaaataagttataaagtgcttccttaaagtgaaatggttaaagttcttgacttaataaagaaaaaaaatgtatgctgaggttgttaagatttacagtaagaatgaatcttctatccagaaattgtgaaggaggaaaaagaaacttgtgctagttttgctgtcacatctgaaactgcaaaagttgtggccacagtgcatcataagtgctaagacgaaaaagacattaaatttgcggatggaaggcgtgaatagaaatgggttctgacagcaatcaggttcggtactattcacagtttcaggcatccgctagggatcttggaacatatcccccatggataagggaggggtactgtaccttgtcatattgtgcattaaagaattcattgagtgtaatcatgtaagtctaacacacatttaaaaagctctcagatatcatttcgccttcggttgatgtaagaaaattcaaagctactcaaatcattcaataaatgataaaattatttaaaaaaaaaaaaaaaaa

SEQ ID NO: 501 - protein, 166 aa, Homo sapien
MAMSQESLTFKDVFVDFTLEEWQQLDSAQKNLYRDVMLENYSHLVSVGYLVAKPDVIFRLGPGGESWMADGGTPVRTCAEVWQVDEQIDHYKESQDKLPWQAAFIGKETLKDESGQESRTCRKSIYLSTEFDSVRQRLPKYYSWEKAFKTSFKLSWSKWKLCKKER

SEQ ID NO: 502 - DNA, 1040 bp, Homo sapien
aacacatttcatctgggcttcttaaatctaaatctttaaaatgactaagttttcttccttttctctgtttttcctaatagttggggcttatatgactcatgtgtgtttcaatatggaaattattggagggaaagaagtgtcacctcattccaggccatttatggcctccatccagtatggcggacatcacgtttgtggaggtgttctgattgatccacagtgggtgctgacagcagcccactgccaatatcggtttaccaaaggccagtctcccactgtggttttaggcgcacactctctctcaaagaatgaggcctccaaacaaacactggagatcaaaaaatttataccattctcaagagttacatcagatcctcaatcaaatgatatcatgctggttaagcttcaaacagccgcaaaactcaataaacatgtcaagatgctccacataagatccaaaacctctcttagatctggaaccaaatgcaaggttactggctggggagccaccgatccagattcattaagaccttctgacaccctgcgagaagtcactgttactgtcctaagtcgaaaactttgcaacagccaaagttactacaacggcgacccttttatcaccaaagacatggtctgtgcaggagatgccaaaggccagaaggattcctgtaagggtgactcagggggccccttgatctgtaaaggtgtcttccacgctatagtctctggaggtcatgaatgtggtgttgccacaaagcctggaatctacaccctgttaaccaagaaataccagacttggatcaaaagcaaccttgtcccgcctcatacaaattaagttacaaataattttattggatgcacttgcttcttttttcctaatatgctcgcaggttagagttgggtgtaagtaaagcagagcacatatggggtccatttttgcacttgtaagtcattttattaaggaatcaagttctttttcacttgtatcactgatgtatttctaccatgctggttttattctaaataaaatttagaagact

SEQ ID NO: 503 - protein, 264 aa, Homo sapien
MTKFSSFSLFFLIVGAYMTHVCFNMEIIGGKEVSPHSRPFMASIQYGGHHVCGGVLIDPQWVLTAAHCQYRFTKGQSPTVVLGAHSLSKNEASKQTLEIKKFIPFSRVTSDPQSNDIMLVKLQTAAKLNKHVKMLHIRSKTSLRSGTKCKVTGWGATDPDSLRPSDTLREVTVTVLSRKLCNSQSYYNGDPFITKDMVCAGDAKGQKDSCKGDSGGPLICKGVFHAIVSGGHECGVATKPGIYTLLTKKYQTWIKSNLVPPHTN

SEQ ID NO: 504 - DNA, 2287 bp, Homo sapien
ggacagcacagctgacagccgtgctcagaaagtttctggatcccaggctcatctccacagaggagaacacgcaggcagcagagaccatggggcccatctcagccccttcctgcagatggcgcatcccctggcaggggctcctgctcacagcctcacttttcaccttctggaacccgcccaccactgctcagctcactattgaagctgtgccatccaatgctgcagaggggaaggaggttcttctacttgtccacaatctgccccaggaccctcgtggctacaactggtacaaaggggaaacagtggatgccaaccgtcgaattataggatatgtaatatcaaatcaacagattaccccagggcctgcatacagcaatcgagagacaatataccccaatgcatccctgctgatgcggaacgtcaccagaaatgacacaggatcctacaccctacaagtcataaagctaaatcttatgagtgaagaagtaactggccagttcagcgtacatccggagactcccaagccctccatctccagcaacaactccaaccccgtggaggacaaggatgctgtggccttcacctgtgaacctgagactcagaacacaacctacctgtggtgggtaaatggtcagagtctcccggtcagtcccaggctgcagctgtccaatggcaacaggaccctcactctactcagtgtcacaaggaatgacgtaggaccctatgaatgtgaaatacagaacccagcgagtgcaaacttcagtgacccagtcaccctgaatgtcctctatggcccagatgcccccaccatttccccttcagacacctattaccatgcaggggtaaatctcaacctctcctgccatgcggcctctaatccaccctcacagtattcttggtctgtcaatggcacattccagcaatacacacaaaagctctttatccccaacatcactacaaagaacagcggatcctatgcctgccacaccactaactcagccactggccgcaacaggaccacagtcaggatgatcacagtctctgatgctgtagtacaaggaagttctcctggcctctcagctagagccactgtcagcatcatgattggagtactggccagggtggctctgatatagtagctctggtgtagtttctgcatttcaagaagactggcagacagttgtttttattcttcctcaaagcatttgcaatcagctaccattcaaaattgcttcttcttcaagatttatggaaaatactctgacgagtactcttgaacacaagttcctgataactttaagatcacgccactggactgtctatgaacttgcaaacaggctgatacctttgtgaagttgcccaccaaaacacagaaggaaaaaaacatgaatttcattgaactaaataataatgaggataatgtttttaagattttttttttttttttttttgagatggaatctcgctctgtcgcccaggctggagtgcagtggcacgatctcaactcactgcaacgtccgcctcctgggttcacaccattctcctgcctcagcctcctgagtagctgggactacaggcgcctgccacaacgcccggctaattttttgtatttttagtagagacggggtttcactgtggtctcaatctcctgacttcatggtccgcctgcctcagcctcccaaagttctgggattacaggtgtgagccaccgcgcccagcccgtttttaagattttttatttgaaaaattgccaattctttaagtgttttctttttcagatttatgaatttctttatcttttaagctatctataccttactgcaatttggtaaagcagacttttgtgaacaaaaattataacatttacttttgctccctacctgactgccacagaactgggcaactattcatgagtattcatatgtttatggtaattcagttatttgcacaagttcagtgagaatctgctgtctttataatgggatatagtttaaaacattggttatattaccaaggctttgattgggatgttatatttgagaaaatacagagaatgatagattaacggagtgtctaatctatcgtgtcaaccccaaatttttacgtatgagatcctttagtccacccaatggctgacagtaacagcatctttaacacaactctttgttcaaatgtactatggtctcttttagagtcagactcctagactcacttgttctcactgtctgttttaatttaacccaggcatgcaatgctagataataaaattgctccctattggctgatc

SEQ ID NO: 505 - protein, 349 aa, Homo sapien [sequence omitted]

SEQ ID NO: 506 - DNA, 2452 bp, Homo sapien
cgcaagaatgcatacaaactccagggctgctctctcctggagagggagggaggggatttaaaaacctgcagcaacatgggggaggaggctgtttgtccttctctctctggggaagtaactcgctcaaactgccttccttgctgagctgcttcgcgtagctttgaggaaggtctagtgaaattggtctttccattacatctggatgtactaccagagagttctgctgctgttgttttttttagcttttctttctttgagtctttaaagggcaattgtcgacactctgcaaacataccgatttgttgtctgcccactttggagtcttcaatctgggcagtaactatttaccctttttcctgctagcctgtccccctctctggattgaagtcacctgctaagacaatggactaccgaccagactcccggaaatcatgttggtaggatcccagtctttttcgcctggagggcccaatgggatcattagaagccagtcctttgcgggtttcagcggcctccaggaaaggcgatccaggtgtaactccttcattgaaaattcctccgctctcaagaagcctcaggccaaactgaagaaaatgcacaatttaggccacaaaaacaacaatccccccaaagagcctcagcctaaaagggtggaagaagtctacagggccttgaaaaatggacttgatgaatatctggaggttcaccagacggagctggacaagttgacagctcagttaaaagatatgaaaagaaactctcgcctgggtgtactgtatgacctagacaagcaaattaaaacaattgaaagatacatgagacgcctggagtttcatataagtaaggtagatgaactctatgaagcttattgtatccagcgacgcctccaggatggtgccagcaaaatgaagcaagccttcgcaacatcccctgccagcaaagctgcccgggagagtctgacagagatcaatcggagcttcaaggagtacacagagaatatgtgcaccattgaagtggagctagagaatctgctgggagaattctccatcaagatgaaaggtctggctggctttgcacgcctctgtcctggagatcaatatgaaattttcatgaagtatggccggcagcggtggaaactgaaaggcaaaatagaagtaaatggcaagcagagctgggatggagaagaaacagtttttctgcccctgatagttgggttcatctccatcaaggtcacggagctcaaagggctagcaactcacatcctggtaggtagcgtgacctgtgagaccaaagagctgtttgcagcccgacctcaggtagtggctgtcgacatcaatgaccttggtaccatcaaactgaacctggaaatcacctggtatccatttgacgtggaggacatgaccgcatcctcaggcgctgggaacaaggcagcagcccttcagaggagaatgtccatgtacagccagggtaccccggaaacgcccaccttcaaagaccactccttcttttcaaatctacctgatgacatctttgaaaatggaaaggcagccgaggagaaaatgccactgtcgctcagcttcagtgacctgcccaacggggactgcgccctcacctcccactcaacaggctccccttccaactcaacaaatccagaaattaccatcacccctgcggagtttaacctcagcagcttggcctcccagaatgagggtatggatgacaccagctcagcatcttccaggaactccctgggagaaggccaagagccaaagtcacacctgaaggaggaagacccagaggagcccagaaaacctgcctcggccccatctgaggcttgccgccgacagtcctcaggtgctggggctgagcacctgttccttgagaatgatgttgcagaagcacttctgcaagagtctgaggaggcctctgagctcaagcctgtggaactggacacttcggaaggaaacatcacaaagcagctggtcaagaggctcacatctgcagaggtgccaatggccacagacaggctgctctctgagggttctgttggtggagaatctgaaggctgcagatcctttctagatggaagcttagaggatgcttttaatgggcttttacttgcattagaaccacataaagagcagtataaagagtttcaggatctgaaccaagaagtcatgaatttggatgatattctaaaaaagtagagaagatcctctaatggatcccagtgtgcccatccctcaacctcctcagtgatcaactcatggccaatcttgtttcctattcttcaacctgctgacttccctctggattcttctgcaaccagtcccagatattgtgccattttatccatggttgtacttcttttttggatataaagatttttaaatgcattttttaaatgctaacaaaaaataaaaacttgaaacaaaaaaaaaaaaaaaaaaaa

SEQ ID NO: 507 - protein, 591 aa, Homo sapien
MLVGSQSFSPGGPNGIIRSQSFAGFSGLQERRSRCNSFIENSSALKKPQAKLKKMHNLGHKNNNPPKEPQPKRVEEVYRALKNGLDEYLEVHQTELDKLTAQLKDMKRNSRLGVLYDLDKQIKTIERYMRRLEFHISKVDELYEAYCIQRRLQDGASKMKQAFATSPASKAARESLTEINRSFKEYTENMCTIEVELENLLGEFSIKMKGLAGFARLCPGDQYEIFMKYGRQRWKLKGKIEVNGKQSWDGEETVFLPLIVGFISIKVTELKGLATHILVGSVTCETKELFAARPQVVAVDINDLGTIKLNLEITWYPFDVEDMTASSGAGNKAAALQRRMSMYSQGTPETPTFKDHSFFSNLPDDIFENGKAAEEKMPLSLSFSDLPNGDCALTSHSTGSPSNSTNPEITITPAEFNLSSLASQNEGMDDTSSASSRNSLGEGQEPKSHLKEEDPEEPRKPASAPSEACRRQSSGAGAEHLFLENDVAEALLQESEEASELKPVELDTSEGNITKQLVKRLTSAEVPMATDRLLSEGSVGGESEGCRSFLDGSLEDAFNGLLLALEPHKEQYKEFQDLNQEVMNLDDILKK

SEQ ID NO: 508 - DNA, 2381 bp, Homo sapien
cgggggctggcggctgcggctcggcggagagtgcggcatgcgctcggaaaaggagggggccggaggccttcgggcggccgttgccgcgcggggcccgagcgggagggagaagctgtcggccctagaagtgcagttccaccgcgactcgcagcagcaggaggctgagacgccgccaacttcgtcctccggttgcgggggcggtgcgggcaaacctcgcgaggagaagaggacggccctgagcaaggtggtcatccgccgcctgcctccgggcctcaccaaggagcagctggaggagcagctgcgcccgctgccagcacacgactacttcgagttcttcgccgccgacctgagtctttatcctcatctctactcaagagcatacattaattttaggaatcctgatgacatccttctttttagagatcgttttgatggatatatcttccttgacagcaaaggcctagaatatcctgcagtggtagagtttgctccattccagaagatagccaaaaagaagctgagaaaaaaagatgccaagactggaagcatcgaagatgatccagaatataagaagtttttagaaacctactgtgtggaggaagagaagaccagtgccaaccctgagactctgctgggggagatggaggcgaagacaagagagctcattgctagaagaaccacacctcttttggaatatattaaaaatagaaaattagaaaagcagagaattcgagaagagaagcgagaagaacggaggaggagagagttagaaaagaaacgtttgcgggaagaggaaaaaagaagaagaagagaagaagaaagatgcaaaaaaaaagagacagataaacagaagaaaattgcagagaaagaagtaaggattaagcttcttaagaaaccagaaaagggagaggaaccaaccacagagaaaccaaaagaaagaggagaggagattgatactggaggtggcaagcaggaatcctgtgcccccggtgcagtcgtaaaagccaggcccatggaaggctcgctggaggagccccaggagacgtcacacagcggcagtgataaagagcacagggatgtggagagatctcaagaacaagaatctgaagcacaaagataccatgtggatgacggcaggaggcacagagctcaccacgagcctgaacggctttccagaaggagtgaggatgagcagagatgggggaaaggacctggccaagacagagggaagaaggggagccaggacagcggggctccgggggaggccatggagagactgggaagagcgcagaggtgtgacgacagtccagcacccagaaaagagcgactggcaaacaaggaccggccagccttgcagctgtatgatccaggagctcgcttccgagcgcgagagtgtggcggaaacaggaggatctgcaaggcagaaggttcggggactggtcctgagaagagggaagaggcagagtgagtcactgcacgcacctggcctccatggacgagcaagggcatcccagaaacgtgtaaatgaccccgagtgtgactgggaaggagaacttattccttaccaggaaactggaagctaaaaatacagagggtgacgtagaaacacgcagaaaccattctaaagaaagtagtgatcttgtattaaattgagcagaattctcacagattttaccattcctgttataaactagtatttgttgtttagccaaaacagaaaatgatttccactggacagtagaaaaatatgtgtaaaatagggaagaaagttagtattggatcagtgtgagtcctgaagcactttcagtgctgtgagaacgacatccactttgggtttcattcgtttgtaagcagaggagctgtcagtcactcgtgcttctcggtggcctctgagccatggtgtcgagtgaagagtagttcttgtttgttacaacctttgtgagtcagccatgcccgcaaagcgtgctgtgttttagtcctggtaggaatatttatcagagttcacactatataaaacccaacagcttcaactattgccctttcaacagttttgccactgaccggatagaaacggtttcagtctctggatggatgtgtttgtggtttgtaaccattacggtttaaaccatggtttaagaatttgcccaaataacagaaattttgttcgggaagggataaactagatatagcatacagagcctgtttttgagttttagatactttatttgtaaataacttaaaatagctttctgaaaccgtgcattctgtagtttcttcctttcagtgaaattgctaaatgtcaatgtatttttggcactgcgattttaaccatttattaaataaaaattttgttaaagaaaaaaaaaaaaaaaaaaaaaaaa

SEQ ID NO: 509 - protein, 476 aa, Homo sapien
MRSEKEGAGGLRAAVAARGPSGREKLSALEVQFHRDSQQQEAETPPTSSSGCGGGAGKPREEKRTALSKVVIRRLPPGLTKEQLEEQLRPLPAHDYFEFFAADLSLYPHLYSRAYINFRNPDDILLFRDRFDGYIFLDSKGLEYPAVVEFAPFQKIAKKKLRKKDAKTGSIEDDPEYKKFLETYCVEEEKTSANPETLLGEMEAKTRELIARRTTPLLEYIKNRKLEKQRIREEKREERRRRELEKKRLREEEKRRRREEERCKKKETDKQKKIAEKEVRIKLLKKPEKGEEPTTEKPKERGEEIDTGGGKQESCAPGAVVKARPMEGSLEEPQETSHSGSDKEHRDVERSQEQESEAQRYHVDDGRRHRAHHEPERLSRRSEDEQRWGKGPGQDRGKKGSQDSGAPGEAMERLGRAQRCDDSPAPRKERLANKDRPALQLYDPGARFRARECGGNRRICKAEGSGTGPEKREEAE

SEQ ID NO: 510 - DNA, 1386 bp, Homo sapien
gccccatctccttgggctgcccgtgcttcgtgctttggactaccgcccagcagtgtcctgccctctgcctgggcctcggtccctcctgcacctgctgcctggatccccggcctgcctgggcctgggccttggttctccccatgacaccacctgaacgtctcttcctcccaagggtgtgtggcaccaccctacacctcctccttctggggctgctgctggttctgctgcctggggcccaggggctccctggtgttggcctcacaccttcagctgcccagactgcccgtcagcaccccaagatgcatcttgcccacagcaccctcaaacctgctgctcacctcattggagaccccagcaagcagaactcactgctctggagagcaaacacggaccgtgccttcctccaggatggtttctccttgagcaacaattctctcctggtccccaccagtggcatctacttcgtctactcccaggtggtcttctctgggaaagcctactctcccaaggccacctcctccccactctacctggcccatgaggtccagctcttctcctcccagtaccccttccatgtgcctctcctcagctcccagaagatggtgtatccagggctgcaggaaccctggctgcactcgatgtaccacggggctgcgttccagctcacccagggagaccagctatccacccacacagatggcatcccccacctagtcctcagccctagtactgtcttctttggagccttcgctctgtagaacttggaaaaatccagaaagaaaaaataattgatttcaagaccttctccccattctgcctccattctgaccatttcaggggtcgtcaccacctctcctttggccattccaacagctcaagtcttccctgatcaagtcaccggagctttcaaagaaggaattctaggcatcccaggggaccacacctccctgaaccatccctgatgtctgtctggctgaggatttcaagcctgcctaggaattcccagcccaaagctgttggtctgtcccaccagctaggtggggcctagatccacacacagaggaagagcaggcacatggaggagcttgggggatgactagaggcagggaggggactatttatgaaggcaaaaaaattaaattatttatttatggaggatggagagaggggaataatagaagaacatccaaggagaaacagagacaggcccaagagatgaagagtgagagggcatgcgcacaaggctgaccaagagagaaagaagtaggcatgagggatcacagggccccagaaggcagggaaaggctctgaaagccagctgccgaccagagccccacacggaggcatctgcaccctcgatgaagcccaataaacctcttttctctg

SEQ ID NO: 511 - protein, 205 aa, Homo sapien
MTPPERLFLPRVCGTTLHLLLLGLLLVLLPGAQGLPGVGLTPSAAQTARQHPKMHLAHSTLKPAAHLIGDPSKQNSLLWRANTDRAFLQDGFSLSNNSLLVPTSGIYFVYSQVVFSGKAYSPKATSSPLYLAHEVQLFSSQYPFHVPLLSSQKMVYPGLQEPWLHSMYHGAAFQLTQGDQLSTHTDGIPHLVLSPSTVFFGAFAL

SEQ ID NO: 512 - DNA, 859 bp, Homo sapien
tggaaagggctgtcacccggcttggccccttccacacccaactggggcaagcctgacccggcgacaggaggcatgaggggcccccggccgaaatgacagtgctggcgccagcctggagcccaacaacctatctcctcctgctgctgctgctgagctcgggactcagtgggacccaggactgctccttccaacacagccccatctcctccgacttcgctgtcaaaatccgtgagctgtctgactacctgcttcaagattacccagtcaccgtggcctccaacctgcaggacgaggagctctgcggggcgctctggcggctggtcctggcacagcgctggatggagcggctcaagactgtcgctgggtccaagatgcaaggcttgctggagcgcgtgaacacggagatacactttgtcaccaaatgtgcctttcagcccccccccagctgtcttcgcttcgtccagaccaacatctcccgcctcctgcaggagacctccgagcagctggtggcgctgaagccctggatcactcgccagaacttctcccggtgcctggagctgcagtgtcagcccgactcctcaaccctgccacccccatggagtccccggcccctggaggccacagccccgacagccccgcagccccctctgctcctcctactgctgctgcccgtgggcctcctgctgctggccgctgcctggtgcctgcactggcagaggacgcggcggaggacaccccgccctggggagcaggtgccccccgtccccagtccccaggacctgctgcttgtggagcactgacctggccaaggcctcatcctggggaggatacgtaggcacacagaggggagtcaccagcc

SEQ ID NO: 513 - protein, 235 aa, Homo sapien
MTVLAPAWSPTTYLLLLLLLSSGLSGTQDCSFQHSPISSDFAVKIRELSDYLLQDYPVTVASNLQDEELCGALWRLVLAQRWMERLKTVAGSKMQGLLERVNTEIHFVTKCAFQPPPSCLRFVQTNISRLLQETSEQLVALKPWITRQNFSRCLELQCQPDSSTLPPPWSPRPLEATAPTAPQPPLLLLLLLPVGLLLLAAAWCLHWQRTRRRTPRPGEQVPPVPSPQDLLLVEH

SEQ ID NO: 514 - DNA, 3655 bp, Homo sapien
cttcagatagattatatctggagtgaaggatcctgccacctacgtatctggcatagtattctgtgtagtgggatgagcagagaacaaaaacaaaataatccagtgagaaaagcccgtaaataaaccttcagaccagagatctattctccagcttattttaagctcaacttaaaaagaagaactgttctctgattcttttcgccttcaatacacttaatgatttaactccaccctccttcaaaagaaacagcatttcctacttttatactgtctatatgattgatttgcacagctcatctggccagaagagctgagacatccgttcccctacaagaaactctccccgggtggaacaagatggattatcaagtgtcaagtccaatctatgacatcaattattatacatcggagccctgccaaaaaatcaatgtgaagcaaatcgcagcccgcctcctgcctccgctctactcactggtgttcatctttggttttgtgggcaacatgctggtcatcctcatcctgataaactgcaaaaggctgaagagcatgactgacatctacctgctcaacctggccatctctgacctgtttttccttcttactgtccccttctgggctcactatgctgccgcccagtgggactttggaaatacaatgtgtcaactcttgacagggctctattttataggcttcttctctggaatcttcttcatcatcctcctgacaatcgataggtacctggctgtcgtccatgctgtgtttgctttaaaagccaggacggtcacctttggggtggtgacaagtgtgatcacttgggtggtggctgtgtttgcgtctctcccaggaatcatctttaccagatctcaaaaagaaggtcttcattacacctgcagctctcattttccatacagtcagtatcaattctggaagaatttccagacattaaagatagtcatcttggggctggtcctgccgctgcttgtcatggtcatctgctactcgggaatcctaaaaactctgcttcggtgtcgaaatgagaagaagaggcacagggctgtgaggcttatcttcaccatcatgattgtttattttctcttctgggctccctacaacattgtccttctcctgaacaccttccaggaattctttggcctgaataattgcagtagctctaacaggttggaccaagctatgcaggtgacagagactcttgggatgacgcactgctgcatcaaccccatcatctatgcctttgtcggggagaagttcagaaactacctcttagtcttcttccaaaagcacattgccaaacgcttctgcaaatgctgttctattttccagcaagaggctcccgagcgagcaagctcagtttacacccgatccactggggagcaggaaatatctgtgggcttgtgacacggactcaagtgggctggtgacccagtcagagttgtgcacatggcttagttttcatacacagcctgggctgggggtggggtgggagaggtcttttttaaaaggaagttactgttatagagggtctaagattcatccatttatttggcatctgtttaaagtagattagatcttttaagcccatcaattatagaaagccaaatcaaaatatgttgatgaaaaatagcaacctttttatctccccttcacatgcatcaagttattgacaaactctcccttcactccgaaagttccttatgtatatttaaaagaaagcctcagagaattgctgattcttgagtttagtgatctgaacagaaataccaaaattatttcagaaatgtacaactttttacctagtacaaggcaacatataggttgtaaatgtgtttaaaacaggtctttgtcttgctatggggagaaaagacatgaatatgattagtaaagaaatgacacttttcatgtgtgatttcccctccaaggtatggttaataagtttcactgacttagaaccaggcgagagacttgtggcctgggagagctggggaagcttcttaaatgagaaggaatttgagttggatcatctattgctggcaaagacagaagcctcactgcaagcactgcatgggcaagcttggctgtagaaggagacagagctggttgggaagacatggggaggaaggacaaggctagatcatgaagaaccttgacggcattgctccgtctaagtcatgagctgagcagggagatcctggttggtgttgcagaaggtttactctgtggccaaaggagggtcaggaaggatgagcatttagggcaaggagaccaccaacagccctcaggtcagggtgaggatggcctctgctaagctcaaggcgtgaggatgggaaggagggaggtattcgtaaggatgggaaggagggaggtattcgtgcagcatatgaggatgcagagtcagcagaactggggtggatttggtttggaagtgagggtcagagaggagtcagagagaatccctagtcttcaagcagattggagaaacccttgaaaagacatcaagcacagaaggaggaggaggaggtttaggtcaagaagaagatggattggtgtaaaaggatgggtctggtttgcagagcttgaacacagtctcacccagactccaggctgtctttcactgaatgcttctgacttcatagatttccttcccatcccagctgaaatactgaggggtctccaggaggagactagatttatgaatacacgaggtatgaggtctaggaacatacttcagctcacacatgagatctaggtgaggattgattacctagtagtcatttcatgggttgttgggaggattctatgaggcaaccacaggcagcatttagcacatactacacattcaataagcatcaaactcttagttactcattcagggatagcactgagcaaagcattgagcaaaggggtcccatataggtgagggaagcctgaaaaactaagatgctgcctgcccagtgcacacaagtgtaggtatcattttctgcatttaaccgtcaataggcaaaggggggaagggacatattcatttggaaataagctgccttgagccttaaaacccacaaaagtacaatttaccagcctccgtatttcagactgaatgggggtggggggggcgccttaggtacttattccagatgccttctccagacaaaccagaagcaacagaaaaaatcgtctctccctccctttgaaatgaatataccccttagtgtttgggtatattcatttcaaagggagagagagaggtttttttctgttctttctcatatgattgtgcacatacttgagactgttttgaatttgggggatggctaaaaccatcatagtacaggtaaggtgagggaatagtaagtggtgagaactactcagggaatgaaggtgtcagaataataagaggtgctactgactttctcagcctctgaatatgaacggtgagcattgtggctgtcagcaggaagcaacgaagggaaatgtctttccttttgctcttaagttgtggagagtgcaacagtagcataggaccctaccctctgggccaagtcaaagacattctgacatcttagtatttgcatattcttatgtatgtgaaagttacaaattgcttgaaagaaaatatgcatctaataaaaaacaccttcta

SEQ ID NO: 515 - protein, 352 aa, Homo sapien [sequence omitted]

SEQ ID NO: 516 - DNA, 4040 bp, Homo sapien
tgcagagaacagagaaaggacatctgcgaggaaagttccctgatggctgtcaacaaagtgccacgtctctatggctgtgtacgctgagcacacgattttatcgcgcctatcatatcttggtgcataaacgcacctcacctcggtcaacccttgctccgtcttatgagacaggctttattatccgcattttatatgaggggaatctgacggtggagagagaattatcttgctcaaggcgacacagcagagcccacaggtggcagaatcccacccgagcccgcttcgacccgcggggtggaaaccacgggcgcccgcccggctgcgcttccagagctgaactgagaagcgagtcctctccgccctgcggccaccgcccagccccgacccccgccccggcccgatcctcactcgccgccagctccccgcgcccaccccggagttggtggcgcagaggcgggaggcggaggcgggagggcgggcgctggcaccgggaacgcccgagcgccggcagagagcgcggagagcgcgacacgtgcggcccagagcaccggggccacccggtccccgcaggcccgggaccgcgcccgctggcaggcgacacgtggaagaatacggagttctataccagagttgattgttgatggcacatacttttagaggatgctcattggcatttatgtttataatcacgtggctgttgattaaagcaaaaatagatgcgtgcaagagaggcgatgtgactgtgaagccttcccatgtaattttacttggatccactgtcaatattacatgctctttgaagcccagacaaggctgctttcactattccagacgtaacaagttaatcctgtacaagtttgacagaagaatcaattttcaccatggccactccctcaattctcaagtcacaggtcttccccttggtacaaccttgtttgtctgcaaactggcctgtatcaatagtgatgaaattcaaatatgtggagcagagatcttcgttggtgttgctccagaacagcctcaaaatttatcctgcatacagaagggagaacaggggactgtggcctgcacctgggaaagaggacgagacacccacttatacactgagtatactctacagctaagtggaccaaaaaatttaacctggcagaagcaatgtaaagacatttattgtgactatttggactttggaatcaacctcacccctgaatcacctgaatccaatttcacagccaaggttactgctgtcaatagtcttggaagctcctcttcacttccatccacattcacattcttggacatagtgaggcctcttcctccgtgggacattagaatcaaatttcaaaaggcttccgtgagcagatgtaccctttattggagagatgagggactggtactgcttaatcgactcagatatcggcccagtaacagcaggctctggaatatggttaatgttacaaaggccaaaggaagacatgatttgctggatctgaaaccatttacagaatatgaatttcagatttcctctaagctacatctttataagggaagttggagtgattggagtgaatcattgagagcacaaacaccagaagaagagcctactgggatgttagatgtctggtacatgaaacggcacattgactacagtagacaacagatttctcttttctggaagaatctgagtgtctcagaggcaagaggaaaaattctccactatcaggtgaccttgcaggagctgacaggagggaaagccatgacacagaacatcacaggacacacctcctggaccacagtcattcctagaaccggaaattgggctgtggctgtgtctgcagcaaattcaaaaggcagttctctgcccactcgtattaacataatgaacctgtgtgaggcagggttgctggctcctcgccaggtctctgcaaactcagagggcatggacaacattctggtgacttggcagcctcccaggaaagatccctctgctgttcaggagtacgtggtggaatggagagagctccatccagggggtgacacacaggtccctctaaactggctacggagtcgaccctacaatgtgtctgctctgatttcagagaacataaaatcctacatctgttatgaaatccgtgtgtatgcactctcaggggatcaaggaggatgcagctccatcctgggtaactctaagcacaaagcaccactgagtggcccccacattaatgccatcacagaggaaaaggggagcattttaatttcatggaacagcattccagtccaggagcaaatgggctgcctcctccattataggatatactggaaggaacgggactccaactcccagcctcagctctgtgaaattccctacagagtctcccaaaattcacatccaataaacagcctgcagccccgagtgacatatgtcctgtggatgacagctctgacagctgctggtgaaagttcccacggaaatgagagggaattttgtctgcaaggtaaagccaattggatggcgtttgtggcaccaagcatttgcattgctatcatcatggtgggcattttctcaacgcattacttccagcaaaaggtgtttgttctcctagcagccctcagacctcagtggtgtagcagagaaattccagatccagcaaatagcacttgcgctaagaaatatcccattgcagaggagaagacacagctgcccttggacaggctcctgatagactggcccacgcctgaagatcctgaaccgctggtcatcagtgaagtccttcatcaagtgaccccagttttcagacatcccccctgctccaactggccacaaagggaaaaaggaatccaaggtcatcaggcctctgagaaagacatgatgcacagtgcctcaagcccaccacctccaagagctctccaagctgagagcagacaactggtggatctgtacaaggtgctggagagcaggggctccgacccaaagccagaaaacccagcctgtccctggacggtgctcccagcaggtgaccttcccacccatgatggctacttaccctccaacatagatgacctcccctcacatgaggcacctctcgctgactctctggaagaactggagcctcagcacatctccctttctgttttcccctcaagttctcttcacccactcaccttctcctgtggtgataagctgactctggatcagttaaagatgaggtgtgactccctcatgctctgagtggtgaggcttcaagccttaaagtcagtgtgccctcaaccagcacagcctgccccaattcccccagcccctgctccagcagctgtcatctctgggtgccaccatcggtctggctgcagctagaggacaggcaagccagctctgggggagtcttaggaactgggagttggtcttcactcagatgcctcatcttgcctttcccagggccttaaaattacatccttcactgtgtggacctagagactccaacttgaattcctagtaactttcttggtatgctggccagaaagggaaatgaggaggagagtagaaaccacagctcttagtagtaatggcatacagtctagaggaccattcatgcaatgactatttctaaagcacctgctacacagcaggctgtacacagcagatcagtactgttcaacagaacttcctgagatgatggaaatgttctacctctgcactcactgtccagtacattagacactaggcacattggctgttaatcacttggaatgtgtttagcttgactgaggaattaaattttgattgtaaatttaaatcgccacacatggctagtggctactgtattggagtgcacagctctagatggctcctagattattgagagcctccaaaacaaatcaacctagttctatagatgaagacataaaagacactggtaaacaccaatgtaaaagggcccccaaggtggtcatgactggtctcatttgcagaagtctaagaatgtacctttttctggccgggcgtggtagctcatgcctgtaatcccagcactttgggaggctga

SEQ ID NO: 517 - protein, 862 aa, Homo sapien
MAHTFRGCSLAFMFIITWLLIKAKIDACKRGDVTVKPSHVILLGSTVNITCSLKPRQGCFHYSRRNKLILYKFDRRINFHHGHSLNSQVTGLPLGTTLFVCKLACINSDEIQICGAEIFVGVAPEQPQNLSCIQKGEQGTVACTWERGRDTHLYTEYTLQLSGPKNLTWQKQCKDIYCDYLDFGINLTPESPESNFTAKVTAVNSLGSSSSLPSTFTFLDIVRPLPPWDIRIKFQKASVSRCTLYWRDEGLVLLNRLRYRPSNSRLWNMVNVTKAKGRHDLLDLKPFTEYEFQISSKLHLYKGSWSDWSESLRAQTPEEEPTGMLDVWYMKRHIDYSRQQISLFWKNLSVSEARGKILHYQVTLQELTGGKAMTQNITGHTSWTTVIPRTGNWAVAVSAANSKGSSLPTRINIMNLCEAGLLAPRQVSANSEGMDNILVTWQPPRKDPSAVQEYVVEWRELHPGGDTQVPLNWLRSRPYNVSALISENIKSYICYEIRVYALSGDQGGCSSILGNSKHKAPLSGPHINAITEEKGSILISWNSIPVQEQMGCLLHYRIYWKERDSNSQPQLCEIPYRVSQNSHPINSLQPRVTYVLWMTALTAAGESSHGNEREFCLQGKANWMAFVAPSICIAIIMVGIFSTHYFQQKVFVLLAALRPQWCSREIPDPANSTCAKKYPIAEEKTQLPLDRLLIDWPTPEDPEPLVISEVLHQVTPVFRHPPCSNWPQREKGIQGHQASEKDMMHSASSPPPPRALQAESRQLVDLYKVLESRGSDPKPENPACPWTVLPAGDLPTHDGYLPSNIDDLPSHEAPLADSLEELEPQHISLSVFPSSSLHPLTFSCGDKLTLDQLKMRCDSLML

SEQ ID NO: 518 - DNA, 2856 bp, Homo sapien
cattcagagacagaaggtggatagacaaatctccaccttcagactggtaggctcctccagaagccatcagacaggaagatgtgaaaatccccagcactcatcccagaatcactaagtggcacctgtcctgggccaaagtcccaggacagacctcattgttcctctgtgggaatacctccccaggagggcatcctggatttcccccttgcaacccaggtcagaagtttcatcgtcaaggttgtttcatcttttttttcctgtctaacagctctgactaccacccaaccttgaggcacagtgaagacatcggtggccactccaataacagcaggtcacagctgctcttctggaggtgtcctacaggtgaaaagcccagcgacccagtcaggatttaagtttacctcaaaaatggaagattttaacatggagagtgacagctttgaagatttctggaaaggtgaagatcttagtaattacagttacagctctaccctgcccccttttctactagatgccgccccatgtgaaccagaatccctggaaatcaacaagtattttgtggtcattatctatgccctggtattcctgctgagcctgctgggaaactccctcgtgatgctggtcatcttatacagcagggtcggccgctccgtcactgatgtctacctgctgaacctagccttggccgacctactctttgccctgaccttgcccatctgggccgcctccaaggtgaatggctggatttttggcacattcctgtgcaaggtggtctcactcctgaaggaagtcaacttctatagtggcatcctgctactggcctgcatcagtgtggaccgttacctggccattgtccatgccacacgcacactgacccagaagcgctacttggtcaaattcatatgtctcagcatctggggtctgtccttgctcctggccctgcctgtcttacttttccgaaggaccgtctactcatccaatgttagcccagcctgctatgaggacatgggcaacaatacagcaaactggcggatgctgttacggatcctgccccagtcctttggcttcatcgtgccactgctgatcatgctgttctgctacggattcaccctgcgtacgctgtttaaggcccacatggggcagaagcaccgggccatgcgggtcatctttgctgtcgtcctcatcttcctgctctgctggctgccctacaacctggtcctgctggcagacaccctcatgaggacccaggtgatccaggagacctgtgagcgccgcaatcacatcgaccgggctctggatgccaccgagattctgggcatccttcacagctgcctcaaccccctcatctacgccttcattggccagaagtttcgccatggactcctcaagattctagctatacatggcttgatcagcaaggactccctgcccaaagacagcaggccttcctttgttggctcttcttcagggcacacttccactactctctaagacctcctgcctaagtgcagcccgtggggttcctcccttctcttcacagtcacattccaagcctcatgtccactggttcttcttggtctcagtgtcaatgcagcccccattgtggtcacaggaagtagaggaggccacgttcttactagtttcccttgcatggtttagaaagcttgccctggtgcctcaccccttgccataattactatgtcatttgctggagctctgcccatcctgcccctgagcccatggcactctatgttctaagaagtgaaaatctacactccagtgagacagctctgcatactcattaggatggctagtatcaaaagaaagaaaatcaggctggccaacggggtgaaacctgtctctactaaaaatacaaaaaaaaaaaaaaattagccgggcgtggtggtgagtgcctgtaatcacagctacttgggaggctgagatgggagaatcacttgaacccgggagcagaggttgcagtgagccgagattgtgcccctgccatccagcctgagcgacagtgagactctgtctcagtccatgaagatgtagaggagaaactggaactctcgagcgttgctgggggggattgtaaaatggtgtgaccactgcagaagacagtatggcagctttcctcaaaacttcagacatagaattaacacatgatcctgcaattccacttataggaattgacccacaagaaatgaaagcagggacttgaacccatatttgtacaccaatattcatagcagcttattcacaagacccaaaaggcagaagcaacccaaatgttcatcaatgaatgaatgaatggctaagcaaaatgtgatatgtacctaacgaagtatccttcagcctgaaagaggaatgaagtactcatacatgttacaacacggacgaaccttgaaaactttatgctaagtgaaataagccagacatcaacagataaatagtttatgattccacctacatgaggtactgagagtgaacaaatttacagagacagaaagcagaacagtgattaccagggactgaggggaggggagcatgggaagtgacggtttaatgggcacagggtttatgtttaggatgttgaaaaagttctgcagataaacagtagtgatagttgtaccgcaatgtgacttaatgccactaaattgacacttaaaaatggtttaaatggtcaattttgttatgtatattttatatcaatttaaaaaaaaacctgagccccaaaaggtattttaatcaccaaggctgattaaaccaaggctagaaccacctgcctatattttttgttaaatgatttcattcaatatcttttttttaataaaccatttttacttgggtgtttat

SEQ ID NO: 519 - protein, 360 aa, Homo sapien
MEDFNMESDSFEDFWKGEDLSNYSYSSTLPPFLLDAAPCEPESLEINKYFVVIIYALVFLLSLLGNSLVMLVILYSRVGRSVTDVYLLNLALADLLFALTLPIWAASKVNGWIFGTFLCKVVSLLKEVNFYSGILLLACISVDRYLAIVHATRTLTQKRYLVKFICLSIWGLSLLLALPVLLFRRTVYSSNVSPACYEDMGNNTANWRMLLRILPQSFGFIVPLLIMLFCYGFTLRTLFKAHMGQKHRAMRVIFAVVLIFLLCWLPYNLVLLADTLMRTQVIQETCERRNHIDRALDATEILGILHSCLNPLIYAFIGQKFRHGLLKILAIHGLISKDSLPKDSRPSFVGSSSGHTSTTL

SEQ ID NO: 520 - DNA, 2211 bp, Homo sapien
ttgggggtttattctcttcccttctaacttgacagggtcttgctctgtcattcaggcaagagtgcagtagtgtgatcacttcttactgccgcctcaagcttccagcctcaactcaagcaatcctcccacctcagccacccaagtggctgggactacagattaagaatgacccaaaataaattaaagctttgttccaaagccaatgtgtatactgaagtgcctgatggaggatggggctgggcggtagctgtttcatttttcttcgttgaagtcttcacctacggcatcatcaagacatttggtgtcttctttaatgacttaatggacagttttaatgaatccaatagcaggatctcatggataatctcaatctgtgtgtttgtcttaacattttcagctcccctcgccacagtcctgagcaatcgtttcggacaccgtctggtagtgatgttgggggggctacttgtcagcaccgggatggtggccgcctccttctcacaagaggtttctcatatgtacgtcgccatcggcatcatctctggtctgggatactgctttagttttctcccaactgtaaccatcctatcacaatattttggcaaaagacgttccatagtcactgcagttgcttccacaggagaatgtttcgctgtgtttgctttcgcaccagcaatcatggctctgaaggagcgcattggctggagatacagcctcctcttcgtgggcctactacagttaaacattgtcatcttcggagcactgctcagacccatcattatcagaggaccagcgtcaccgaaaatagtcatccaggaaaatcggaaagaagcgcagtatatgcttgaaaatgagaaaacacgaacctcaatagactccattgactcaggagtagaactaactacctcacctaaaaatgtgcctactcacactaacctggaactggagccgaaggccgacatgcagcaggtcctggtgaagaccagccccaggccaagcgaaaagaaagccccgctattagacttctccattttgaaagagaaaagttttatttgttatgcattatttggtctctttgcaacactgggattctttgcaccttccttgtacatcattcctctgggcattagtctgggcattgaccaggaccgcgctgcttttttattatctacgatggccattgcagaagttttcggaaggatcggagctggttttgtcctcaacagggagcccattcgtaagatttacattgagctcatctgcgtcatcttattgactgtgtctctgtttgcctttacttttgctactgaattctggggtctaatgtcatgcagcatattttttgggtttatggttggaacaataggaggactcacattccactgcttgctgaagatgatgtcgtgggcattgcagaagatgtcttctgcagctggggtctacatcttcattcagagcatagcaggactggctggaccgccccttgcaggtttgttggtggaccaaagtaagatctacagcagggccttctactcctgcgcagctggcatggccctggctgctgtgtgcctcgccctggtgagaccgtgtaagatgggactgtgccagcgtcatcactcaggtgaaacaaaggtagtgagccatcgtgggaagactttacaggacatacctgaagactttctggaaatggatcttgcaaaaaatgagcacagagttcacgtgcaaatggagccggtatgacacactttcttacaacaacagccactgtgttggctggagagggatggggtgggcccaacggggacacaaggaggcagaggagctaacccctctactccactttcaaaactacattttaaagggaatgtgtatgtgaagagcactaccaacatcgcttttgttttgttttgttttgttttaagctttttttttttgcttgtttttaaagccaaaacaaaaaacaaccaagcactcttccatatataaatctggctgtattcagtagcaatacaagagatatgtagaaagactctttggttcacattccgatattaaaatagtgacatgaactggcaaagtggttttaaaagctttcacgtgggataaatgattttctttttttcttttctttcttcctatggtcttgtctgaataaactactctcctgaataaaacaacatccaacccaggtcattgaaatgaaattggccagtc

SEQ ID NO: 521 - protein, 523 aa, Homo sapien
MTQNKLKLCSKANVYTEVPDGGWGWAVAVSFFFVEVFTYGIIKTFGVFFNDLMDSFNESNSRISWIISICVFVLTFSAPLATVLSNRFGHRLVVMLGGLLVSTGMVAASFSQEVSHMYVAIGIISGLGYCFSFLPTVTILSQYFGKRRSIVTAVASTGECFAVFAFAPAIMALKERIGWRYSLLFVGLLQLNIVIFGALLRPIIIRGPASPKIVIQENRKEAQYMLENEKTRTSIDSIDSGVELTTSPKNVPTHTNLELEPKADMQQVLVKTSPRPSEKKAPLLDFSILKEKSFICYALFGLFATLGFFAPSLYIIPLGISLGIDQDRAAFLLSTMAIAEVFGRIGAGFVLNREPIRKIYIELICVILLTVSLFAFTFATEFWGLMSCSIFFGFMVGTIGGLTFHCLLKMMSWALQKMSSAAGVYIFIQSIAGLAGPPLAGLLVDQSKIYSRAFYSCAAGMALAAVCLALVRPCKMGLCQRHHSGETKVVSHRGKTLQDIPEDFLEMDLAKNEHRVHVQMEPV

SEQ ID NO: 522 - DNA, 856 bp, Homo sapien
gcggggtagtcggcgcgaggcggagcttggcagttccgtccacttcagccgcagcgtccctcgccgggtgtctcgccgcagcctccggagaggaacagaccctcactctctctgtcagaaaaatgtctgctccagctcagccacctgctgaagggacagaagggactgccccaggtgggggtccccctggccctcctcctaacatgaccagtaacagacgactacagcaaacccaggcacaagtggaggaggtggtggacatcatacgtgtgaacgtggacaaggtcctggagagggaccagaagctgtcagagctggatgaccgagctgatgccttgcaggcaggagcatcacaatttgagagcagtgctgccaagctaaagaggaagtattggtggaaaaactgcaagatgatgatcatgctgggagccatctgtgccatcatcgtggtagttattgtaaggcgggactgaagagctggaagaaagcagtcagtaccctcccaacggcccccctcgaaggtctccactctcctctgggctcctccttgcctaatgcagggggtcaccgctggagaagaaccaccactgtcctcgatgtgtcccaagcctggagcgaatccgtcctcttggctctcccagccctatcacaggaatcattcctgggtttctgtccctctgaggctcaccaggtgtagttggccttgttctttgggggtattagcccttctactttctttctcacccaccctgtaccctcttctgtgtgtctctgctatccccctttcctcccaccacccatgtgcatgagcaaatgtgcaacaaaaccctgggactttgcagtcaaatgaagctga

SEQ ID NO: 523 - protein, 116 aa, Homo sapien
MSAPAQPPAEGTEGTAPGGGPPGPPPNMTSNRRLQQTQAQVEEVVDIIRVNVDKVLERDQKLSELDDRADALQAGASQFESSAAKLKRKYWWKNCKMMIMLGAICAIIVVVIVRRD

SEQ ID NO: 524 - DNA, 1585 bp, Homo sapien
cacaccctgacaagctgccaggcaggttctcttcctctcacatactgacccacggctccaccctctctcccctggaaaggacaccatgagcactgaaagcatgatccgggacgtggagctggccgaggaggcgctccccaagaagacaggggggccccagggctccaggcggtgcttgttcctcagcctcttctccttcctgatcgtggcaggcgccaccacgctcttctgcctgctgcactttggagtgatcggcccccagagggaagagtcccccagggacctctctctaatcagccctctggcccaggcagtcagatcatcttctcgaaccccgagtgacaagcctgtagcccatgttgtagcaaaccctcaagctgaggggcagctccagtggctgaaccgccgggccaatgccctcctggccaatggcgtggagctgagagataaccagctggtggtgccatcagagggcctgtacctcatctactcccaggtcctcttcaagggccaaggctgcccctccacccatgtgctcctcacccacaccatcagccgcatcgccgtctcctaccagaccaaggtcaacctcctctctgccatcaagagcccctgccagagggagaccccagagggggctgaggccaagccctggtatgagcccatctatctgggaggggtcttccagctggagaagggtgaccgactcagcgctgagatcaatcggcccgactatctcgactttgccgagtctgggcaggtctactttgggatcattgccctgtgaggaggacgaacatccaaccttcccaaacgcctcccctgccccaatccctttattaccccctccttcagacaccctcaacctcttctggctcaaaaagagaattgggggcttagggtcggaacccaagcttagaactttaagcaacaagaccaccacttcgaaacctgggattcaggaatgtgtggcctgcacagtgaagtgctggcaaccactaagaattcaaactggggcctccagaactcactggggcctacagctttgatccctgacatctggaatctggagaccagggagcctttggttctggccagaatgctgcaggacttgagaagacctcacctagaaattgacacaagtggaccttaggccttcctctctccagatgtttccagacttccttgagacacggagcccagccctccccatggagccagctccctctatttatgtttgcacttgtgattatttattatttatttattatttatttatttacagatgaatgtatttatttgggagaccggggtatcctgggggacccaatgtaggagctgccttggctcagacatgttttccgtgaaaacggaggctgaacaataggctgttcccatgtagccccctggcctctgtgccttcttttgattatgttttttaaaatattatctgattaagttgtctaaacaatgctgatttggtgaccaactgtcactcattgctgaggcctctgctccccagggagttgtgtctgtaatcggcctactattcagtggcgagaaataaaggttgcttaggaaagaa

SEQ ID NO: 525 - protein, 233 aa, Homo sapien [sequence omitted]

SEQ ID NO: 526 - DNA, 4193 bp, Homo sapien
catggcggcgactgcggcaaagcgagagcctcggagacgccgctgccgccagcacagccggagatctgagccgacactgggggcagtccgcgagccccgcactctctcgatgagtcggagaagtcccgttgtatcagagtaagatggacggtagctttgattgtgattgtggtgagctggagccacctgatcactaacaaaagacatcttctgttaaccaacagccgccaggcttcctgttgaaataaatatatagcaacaaaggaaaaaaagaagcaaaacggaaatagtgcttaccagcaccttagaatgatgctgctcaggaccagtccaacactgaatgtatctgcactgtgaggagaatgttcatagaagcctgttgtgtgcatatttattcactttttgttaaatgttaaatcgtttagcacggtaatctgagtgcacagtatgtcatttcattccgtttgagtttcttgttttcgttaaatgtctgcagagttgctgcccctttcttgaactatgagtactgcaatctttttaattctcaatatgaatagagctttttgagctttaaatctaaggggaactcgacaggcctgtttggcatatgcaatgaacatcaagaaaccatcttgctgtggaagcataattatttttcttctccctttttgaaagatctttccttttgatgccagttttcttccttgtttacacaagttcaatttgaaaggaaaaggcaatagtaagggtttcaaaatggcagagaaatttgaaagtctcatgaacattcatggttttgatctgggttctaggtatatggacttaaaaccattgggttgtggaggcaatggcttggttttttctgctgtagacaatgactgtgacaaaagagtagccatcaagaaaattgtccttactgatccccagagtgtcaaacatgctctacgtgaaatcaaaattattagaagacttgaccatgataacattgtgaaagtgtttgagattcttggtcccagtggaagccaattaacagacgatgtgggctctcttacggaactgaacagtgtttacattgttcaggagtacatggagacagacttggctaatgtgctggagcagggccctttactggaagagcatgccaggcttttcatgtatcagctgctacgggggctcaagtatattcactctgcaaatgtactgcacagagatctcaaaccagctaatcttttcattaatacggaagacttggtgctgaagataggtgactttggtcttgcacggatcatggatcctcattattcccataagggtcatctttctgaaggattggttactaaatggtacagatctccacgtcttttactttctcctaataattatactaaagccattgacatgtgggctgcaggctgcatctttgctgaaatgctgactggtaaaaccctttttgcaggtgcacatgaacttgaacagatgcagctgattttagaatctattcctgttgtacatgaggaagatcgtcaggagcttctcagcgtaattccagtttacattagaaatgacatgactgagccacacaaacctttaactcagctgcttccaggaattagtcgagaagcactggatttcctggaacaaattttgacatttagccccatggatcggttaacagcagaagaagcactctcccatccttacatgagcatatattcttttccaatggatgagccaatttcaagccatccttttcatattgaagatgaagttgatgatattttgcttatggatgaaactcacagtcacatttataactgggaaaggtatcatgattgtcagttttcagagcatgattggcctgtacataacaactttgatattgatgaagttcagcttgatccaagagctctgtccgatgtcactgatgaagaagaagtacaagttgatccccgaaaatatttggatggagatcgggaaaagtatctggaggatcctgcttttgataccaattactctactgagccttgttggcaatactcagatcatcatgaaaacaaatattgtgatctggagtgtagccatacttgtaactacaaaacgaggtcatcatcatatttagataacttagtttggagagagagtgaagttaaccattactatgaacccaagcttattatagatctttccaattggaaagaacaaagcaaagaaaaatctgataagaaaggcaaatcaaaatgtgaaaggaatggattggttaaagcccagatagcgctagaggaagcatcacagcaactggctggaaaagaaagggaaaagaatcagggatttgattttgattcctttattgcaggaactattcagcttagttcccagcatgagcctactgatgttgttgataaattaaatgacttgaatagctcagtgtcccaactagaattgaaaagtttgatatcaaagtcagtaagccaagaaaaacaggaaaaaggaatggcaaatctggctcaattagaagccttgtaccagtcttcttgggacagccagtttgtgagtggtggggaggactgttttttcataaatcagttttgtgaggtaaggaaggatgaacaagttgagaaggaaaacacttacactagttacttggacaagttctttagcaggaaagaagatactgaaatgctagaaactgagccagtagaggatgggaagcttggggagagaggacatgaggaaggatttctgaacaacagtggggagttcctctttaacaagcagctcgagtccataggcatcccacagtttcacagtccagttgggtcaccacttaagtcaatacaggccacattaacaccttctgctatgaaatcttcccctcaaattcctcatcaaacatacagcagcattctgaaacatctgaactaaaacactcagcagacatttatctttgtattcttcatgaaatgtgttttgtctttttttattactagtgtttaagtcattttttacttgaatcagatggtgtcatttagtaaggattttatgagttcttgttttttaaaatccagactttctttttctacatgtgagatagttttcattttaactggcatgtcatttgcacacaaaaataaagactagagcaaaataatgcaacgcaggaggagaaaagaaatgcactaagacaagaacattctctcatagaacattgatctgttttacaggaaacaaaccttgccttgaaatttacacagtgagactgtacataattgcatgaaaatagctatttttttcctaagacatttttcattcatgaatattttcaagtttttcatactgtacacatttcttaaaacacatgataccagcagcaactgaaaatgaatgccgaatttggtacacatgtgttatctacctcaaggtaacaagagtatgtggcaaaacatataccacccatagtgcttcacaaaatgcacttctatttagccagcgtttattgtagtaaactattcttaataaaactcactcactgtttataaatgttctggtatgcattctttatagtgaagtgttaatacatcacatcttatttattttagcaaatcagtatattttctgtatttaattataaaaaattaacttagtttttaaaatttatttgcaaatatactttttccatttggcactatggtttgttgcctacctagctgcatctataatgtcagcttatcctaaggctgtccacgtacttaatttacttaagtgttcattttaagtaacgtgctcactgtgtataggaatttgtattttggaggtgcttgatctatctacaaagaaaaattaattaggaattactttattataaaatgctcctagaagtcttaattgtgtttattttttaaaaaaacaaatgttagacttgtgtgcatggaagtaattaaggtacatcattattgtagtttgaaagttgtacatgataagacattttgtttttactgtatgtttttactgaatgatctattccccatcccaaggcaagcatgaataaaattaggttaaacgtagcatgtggcatcgcagtctcttagaatttgtttcatctattttattttattgaatactgtctgtatctttggttatcctgtttgaagaaaaaggacaaataaaacatggccagcaaatacaaaaaaaaaaaa

SEQ ID NO: 527 - protein, 721 aa, Homo sapien
MAEKFESLMNIHGFDLGSRYMDLKPLGCGGNGLVFSAVDNDCDKRVAIKKIVLTDPQSVKHALREIKIIRRLDHDNIVKVFEILGPSGSQLTDDVGSLTELNSVYIVQEYMETDLANVLEQGPLLEEHARLFMYQLLRGLKYIHSANVLHRDLKPANLFINTEDLVLKIGDFGLARIMDPHYSHKGHLSEGLVTKWYRSPRLLLSPNNYTKAIDMWAAGCIFAEMLTGKTLFAGAHELEQMQLILESIPVVHEEDRQELLSVIPVYIRNDMTEPHKPLTQLLPGISREALDFLEQILTFSPMDRLTAEEALSHPYMSIYSFPMDEPISSHPFHIEDEVDDILLMDETHSHIYNWERYHDCQFSEHDWPVHNNFDIDEVQLDPRALSDVTDEEEVQVDPRKYLDGDREKYLEDPAFDTNYSTEPCWQYSDHHENKYCDLECSHTCNYKTRSSSYLDNLVWRESEVNHYYEPKLIIDLSNWKEQSKEKSDKKGKSKCERNGLVKAQIALEEASQQLAGKEREKNQGFDFDSFIAGTIQLSSQHEPTDVVDKLNDLNSSVSQLELKSLISKSVSQEKQEKGMANLAQLEALYQSSWDSQFVSGGEDCFFINQFCEVRKDEQVEKENTYTSYLDKFFSRKEDTEMLETEPVEDGKLGERGHEEGFLNNSGEFLFNKQLESIGIPQFHSPVGSPLKSIQATLTPSAMKSSPQIPHQTYSSILKHLN

SEQ ID NO: 528 - DNA, 1247 bp, Homo sapien
gtaaagctagaccgatctccggggagccccggagtaggcgagcggcggccgccagctagttgagcgcaccccccgcccgccccagcggcgccgcggcgggcggcgtccaggcggcatggagaaggacggcctgtgccgcgctgaccagcagtacgaatgcgtggcggagatcggggagggcgcctatgggaaggtgttcaaggcccgcgacttgaagaacggaggccgtttcgtggcgttgaagcgcgtgcgggtgcagaccggcgaggagggcatgccgctctccaccatccgcgaggtggcggtgctgaggcacctggagaccttcgagcaccccaacgtggtcaggttgtttgatgtgtgcacagtgtcacgaacagacagagaaaccaaactaactttagtgtttgaacatgtcgatcaagacttgaccacttacttggataaagttccagagcctggagtgcccactgaaaccataaaggatatgatgtttcagcttctccgaggtctggactttcttcattcacaccgagtagtgcatcgcgatctaaaaccacagaacattctggtgaccagcagcggacaaataaaactcgctgacttcggccttgcccgcatctatagtttccagatggctctaacctcagtggtcgtcacgctgtggtacagagcacccgaagtcttgctccagtccagctacgccacccccgtggatctctggagtgttggctgcatatttgcagaaatgtttcgtagaaagcctctttttcgtggaagttcagatgttgatcaactaggaaaaatcttggacgtgattggactcccaggagaagaagactggcctagagatgttgcccttcccaggcaggcttttcattcaaaatctgcccaaccaattgagaagtttgtaacagatatcgatgaactaggcaaagacctacttctgaagtgtttgacatttaacccagccaaaagaatatctgcctacagtgccctgtctcacccatacttccaggacctggaaaggtgcaaagaaaacctggattcccacctgccgcccagccagaacacctcggagctgaatacagcctgaggcctcagcagccgccttaagctgatcctgcggagaacacccttggtggcttatgggtccccctcagcaagccctacagagctgtggaggattgctatctggaggccttccagctgctgtcttctggacaggctctgcttctccaaggaaa

SEQ ID NO: 529 - protein, 326 aa, Homo sapien
MEKDGLCRADQQYECVAEIGEGAYGKVFKARDLKNGGRFVALKRVRVQTGEEGMPLSTIREVAVLRHLETFEHPNVVRLFDVCTVSRTDRETKLTLVFEHVDQDLTTYLDKVPEPGVPTETIKDMMFQLLRGLDFLHSHRVVHRDLKPQNILVTSSGQIKLADFGLARIYSFQMALTSVVVTLWYRAPEVLLQSSYATPVDLWSVGCIFAEMFRRKPLFRGSSDVDQLGKILDVIGLPGEEDWPRDVALPRQAFHSKSAQPIEKFVTDIDELGKDLLLKCLTFNPAKRISAYSALSHPYFQDLERCKENLDSHLPPSQNTSELNTA

SEQ ID NO: 530 - DNA, 542 bp, Homo sapien
gtctgccctctctgctcgccctgcctagcttgaggatctgtcaccccagccatgaggattatcgccctcctcgctgctattctcttggtagccctccaggtccgggcaggcccactccaggcaagaggtgatgaggctccaggccaggagcagcgtgggccagaagaccaggacatatctatttcctttgcatgggataaaagctctgctcttcaggtttcaggctcaacaaggggcatggtctgctcttgcagattagtattctgccggcgaacagaacttcgtgttgggaactgcctcattggtggtgtgagtttcacatactgctgcacgcgtgtcgattaacgttctgctgtccaagagaatgtcatgctgggaacgccatcatcggtggtgttagcttcacatgcttctgcagctgagcttgcagaatagagaaaaatgagctcataatttgctttgagagctacaggaaatggttgtttctcctatactttgtccttaacatctttcttgatcctaaatatatatctcgtaacaag

SEQ ID NO: 531 - protein, 97 aa, Homo sapien
MRIIALLAAILLVALQVRAGPLQARGDEAPGQEQRGPEDQDISISFAWDKSSALQVSGSTRGMVCSCRLVFCRRTELRVGNCLIGGVSFTYCCTRVD

SEQ ID NO: 532 - DNA, 894 bp, Homo sapien
cagtctcaatgggggcactggggctggagggcaggggtgggaggctccaggggaggggttccctcctgctagctgtggcaggagccacttctctggtgaccttgttgctggcggtgcctatcactgtcctggctgtgctggccttagtgccccaggatcagggaggactggtaacggagacggccgaccccggggcacaggcccagcaaggactggggtttcagaagctgccagaggaggagccagaaacagatctcagccccgggctcccagctgcccacctcataggcgctccgctgaaggggcaggggctaggctgggagacgacgaaggaacaggcgtttctgacgagcgggacgcagttctcggacgccgaggggctggcgctcccgcaggacggcctctattacctctactgtctcgtcggctaccggggccgggcgccccctggcggcggggacccccagggccgctcggtcacgctgcgcagctctctgtaccgggcggggggcgcctacgggccgggcactcccgagctgctgctcgagggcgccgagacggtgactccagtgctggacccggccaggagacaagggtacgggcctctctggtacacgagcgtggggttcggcggcctggtgcagctccggaggggcgagagggtgtacgtcaacatcagtcaccccgatatggtggacttcgcgagagggaagaccttctttggggccgtgatggtggggtgagggaatatgagtgcgtggtgcgagtgcgtgaatattgggggcccggacgcccaggaccccatggcagtgggaaaaatgtaggagactgtttggaaattgattttgaacctgatgaaaataaagaatggaaagcttcagtgctgccgataaa

SEQ ID NO: 533 - protein, 77 aa, Homo sapien
MGALGLEGRGGRLQGRGSLLLAVAGATSLVTLLLAVPITVLAVLALVPQDQGGLGFRSCQRRSQKQISAPGSQLPTS

SEQ ID NO: 534 - DNA, 1610 bp, Homo sapien
cccagagcagcgctcgccacctccccccggcctgggcagcgctcgcccggggagtccagcggtgtcctgtggagctgccgccatggccccgcggcgggcgcgcggctgccggaccctcggtctcccggcgctgctactgctgctgctgctccggccgccggcgacgcggggcatcacgtgccctccccccatgtccgtggaacacgcagacatctgggtcaagagctacagcttgtactccagggagcggtacatttgtaactctggtttcaagcgtaaagccggcacgtccagcctgacggagtgcgtgttgaacaaggccacgaatgtcgcccactggacaacccccagtctcaaatgcattagagaccctgccctggttcaccaaaggccagcgccaccctccacagtaacgacggcaggggtgaccccacagccagagagcctctccccttctggaaaagagcccgcagcttcatctcccagctcaaacaacacagcggccacaacagcagctattgtcccgggctcccagctgatgccttcaaaatcaccttccacaggaaccacagagataagcagtcatgagtcctcccacggcaccccctctcagacaacagccaagaactgggaactcacagcatccgcctcccaccagccgccaggtgtgtatccacagggccacagcgacaccactgtggctatctccacgtccactgtcctgctgtgtgggctgagcgctgtgtctctcctggcatgctacctcaagtcaaggcaaactcccccgctggccagcgttgaaatggaagccatggaggctctgccggtgacttgggggaccagcagcagagatgaagacttggaaaactgctctcaccacctatgaaactcggggaaaccagcccagctaagtccggagtgaaggagcctctctgctttagctaaagacgactgagaagaggtgcaaggaagcgggctccaggagcaagctcaccaggcctctcagaagtcccagcaggatctcacggactgccgggtcggcgcctcctgcgcgagggagcaggttctccgcattcccatgggcaccacctgcctgcctgtcgtgccttggacccagggcccagcttcccaggagagaccaaaggcttctgagcaggatttttatttcattacagtgtgagctgcctggaatacatgtggtaatgaaataaaaaccctgccccgaatcttccgtccctcatcctaacttgcagttcacagagaaaagtgacatacccaaagctctctgtcaattacaaggcttctcctggcgtgggagacgtctacagggaagacaccagcgtttgggcttctaaccaccctgtctccagctgctctgcacacatggacagggacctgggaaaggtgggagagatgctgagcccagcgaatcctctccattgaaggattcaggaagaagaaaactcaactcagtgccattttacgaatatatgcgtttatatttatacttccttgtctattatatctatacattatatattatttgtattttgacattgtaccttgtataaacaaaataaaacatctattttcaatatttttaaaatgca

SEQ ID NO: 535 - protein, 267 aa, Homo sapien
MAPRRARGCRTLGLPALLLLLLLRPPATRGITCPPPMSVEHADIWVKSYSLYSRERYICNSGFKRKAGTSSLTECVLNKATNVAHWTTPSLKCIRDPALVHQRPAPPSTVTTAGVTPQPESLSPSGKEPAASSPSSNNTAATTAAIVPGSQLMPSKSPSTGTTEISSHESSHGTPSQTTAKNWELTASASHQPPGVYPQGHSDTTVAISTSTVLLCGLSAVSLLACYLKSRQTPPLASVEMEAMEALPVTWGTSSRDEDLENCSHHL

SEQ ID NO: 536 - DNA, 3452 bp, Homo sapien
ctgaagcttgcatgcctgcaggtcgacccacgcgtccgcggacgcgtgggcggacgcgtgggtttttcctttcttccagaaggagatttaaccatagtagaaagaatggagaactattaactgccttccttctgtgggctgtgattttcagaggggaatgctaagaggtgattttcaatgttgggactcaaaggtgaagacactgaaggacagaatttttggcagaggaaagatcttcttcggtcaccatacttgagttagctctagggaagtggaggtttccatttggaattctatagcttcttccaggtcatagtgtctgccccccaccttccagtatctcctgatatgcagcatgaatgaaaatggcaagtttcctggccttccttctgctcaactttcgtgtctgcctccttttgcttcagctgctcatgcctcactcagctcagttttctgtgcttggaccctctgggcccatcctggccatggtgggtgaagacgctgatctgccctgtcacctgttcccgaccatgagtgcagagaccatggagctgaagtgggtgagttccagcctaaggcaggtggtgaacgtgtatgcagatggaaaggaagtggaagacaggcagagtgcaccgtatcgagggagaacttcgattctgcgggatggcatcactgcagggaaggctgctctccgaatacacaacgtcacagcctctgacagtggaaagtacttgtgttatttccaagatggtgacttctatgaaaaagccctggtggagctgaaggttgcagcactgggttctgatcttcacgttgatgtgaagggttacaaggatggagggatccatctggagtgcaggtccactggctggtacccccaaccccaaatacagtggagcaacaacaagggagagaacatcccgactgtggaagcacctgtggttgcagacggagtgggcctgtatgcagtagcagcatctgtgatcatgagaggcagctctggggagggtgtatcctgtaccatcagaagttccctcctcggcctggaaaagacagccagcatttccatcgcagaccccttcttcaggagcgcccagaggtggatcgccgccctggcacggaccctgcctgtcttgctgctgcttcttgggggagccggttacttcctgtggcaacagcaggaggaaaaaaagactcagttcagaaagaaaaagagagagcaagagttgagagaaatggcatggagcacaatgaagcaagaacaaagcacaagagtgaagctcctggaggaactcagatggagaagtatccagtatgcatctcggggagagagacattcagcctataatgaatggaaaaaggccctcttcaagcctgcggatgtgattctggatccaaaaacagcaaaccccatcctccttgtttctgaggaccagaggagtgtgcagcgtgccaaggagccccaggatctgccagacaaccctgagagatttaattggcattattgtgttctcggctgtgagagcttcatatcagggagacattactgggaggtggaggtaggggacaggaaagagtggcatataggggtgtgcagtaagaatgtgcagagaaaaggctgggtcaaaatgacacctgagaatggattctggactatggggctgactgatgggaataagtatcggactctaactgagcccagaaccaacctgaaacttcctaagccccctaagaaagtgggggtcttcctggactatgagactggagatatctcattctacaatgctgtggatggatcgcatattcatactttcctggacgtctccttctctgaggctctatatcctgttttcagaattttgaccttggagcccacggccctgagtatttgtccagcgtgaaaagaagaagagagttcctccaattctgaccgagtgctgatcattccctagagacaccagtaaccccgggcttagctaacgaaagtggggagcctcaggctgaagtaacttttctctgcttctccctgcccagctcagagctgagggcctccccctccacagcaaccaatcacaaccataaagctacaagcacgcactgaagcactttactgatactcattcaattattcatatgacagttgtttgagtttggtaccatcttattttccccttatacagataaggaaactggggtgcagaaaagtgaattgactacaaagtagacatgactagttaacaacacagctgggatctaaacagcaataactaacattaatggagaacttaaaatgctctgagtgctgtgttatgagctttggtggatgtcactcctttaatcctcgcaacaccctgtcgggtagtctcatttagcaagtatggaagttgaggcagggcaacattaagcaacttacataactcatgcagtaatttctgcagttgggagatgttcagcttcagtccccggccctatggccgttcttttccaccctgtttcttcccccataggaagaacccacctgtagccctgaggttcttttcccaggatggctccaggataaggatcactgtaggtggttgtggagttgacacccctgttgactccttcccagctgattgtcagagccttagacccagcacgccttggattagctttgcagagtgtcttggttgagagaataacctcaccgtacccacatgacacgtgatttggaaagagactagaggccacacttgataaatcatggggaacagatgtgttccacccaacaaatgtgataagtgatcatgcagccagagccagccttccttcaatcaaggtttccaggcagagcaaataccctagagattttctgtgatataggaaatttggatgaagggagctagaagaaatacagggatttttttttttttttaagatggagtcttactctgttgctaggctggagtgcagtggtgcgatctcagctccctgcaacctccacctcctgggttcaaacaattctcctgcctcagcctcccgagtactgggaatataggtgcacgccaccacacccaacaaatttttgtacttttagtacagatgagggttcactatgttggccaggatggtctcgatctcttgacctcatgatccacccacctcggtctcccaaagtgctgggattacaggcttgagccaccgggtgaccggcttacagggatatttttaatcccgttatggactctgtctccaggagaggggtctatccacccctgctcattggtggatgttaaaccaatattcctttcaactgctgcctgctagggaaaaactactcctcattatcatcattattattgctctccactgtatcccctctacctggcatgtgcttgtcaagttctagttgttcaataaatttgttaataatgctgaaaaaaaaaaaaaaaaaaaaaaaaaaaaaaaaaaaa

SEQ ID NO: 537 - protein, 513 aa, Homo sapien
MKMASFLAFLLLNFRVCLLLLQLLMPHSAQFSVLGPSGPILAMVGEDADLPCHLFPTMSAETMELKWVSSSLRQVVNVYADGKEVEDRQSAPYRGRTSILRDGITAGKAALRIHNVTASDSGKYLCYFQDGDFYEKALVELKVAALGSDLHVDVKGYKDGGIHLECRSTGWYPQPQIQWSNNKGENIPTVEAPVVADGVGLYAVAASVIMRGSSGEGVSCTIRSSLLGLEKTASISIADPFFRSAQRWIAALARTLPVLLLLLGGAGYFLWQQQEEKKTQFRKKKREQELREMAWSTMKQEQSTRVKLLEELRWRSIQYASRGERHSAYNEWKKALFKPADVILDPKTANPILLVSEDQRSVQRAKEPQDLPDNPERFNWHYCVLGCESFISGRHYWEVEVGDRKEWHIGVCSKNVQRKGWVKMTPENGFWTMGLTDGNKYRTLTEPRTNLKLPKPPKKVGVFLDYETGDISFYNAVDGSHIHTFLDVSFSEALYPVFRILTLEPTALSICPA

SEQ ID NO: 538 - DNA, 1937 bp, Homo sapien
ggcacgaggggagtggaaagttctccggcagccctgagatctcaagagtgacatttgtgagaccagctaatttgattaaaattctcttggaatcagctttgctagtatcatacctgtgccagatttcatcatgggaaacagctgttacaacatagtagccactctgttgctggtcctcaactttgagaggacaagatcattgcaggatccttgtagtaactgcccagctggtacattctgtgataataacaggaatcagatttgcagtccctgtcctccaaatagtttctccagcgcaggtggacaaaggacctgtgacatatgcaggcagtgtaaaggtgttttcaggaccaggaaggagtgttcctccaccagcaatgcagagtgtgactgcactccagggtttcactgcctgggggcaggatgcagcatgtgtgaacaggattgtaaacaaggtcaagaactgacaaaaaaaggttgtaaagactgttgctttgggacatttaacgatcagaaacgtggcatctgtcgaccctggacaaactgttctttggatggaaagtctgtgcttgtgaatgggacgaaggagagggacgtggtctgtggaccatctccagccgacctctctccgggagcatcctctgtgaccccgcctgcccctgcgagagagccaggacactctccgcagatcatctccttctttcttgcgctgacgtcgactgcgttgctcttcctgctgttcttcctcacgctccgtttctctgttgttaaacggggcagaaagaaactcctgtatatattcaaacaaccatttatgagaccagtacaaactactcaagaggaagatggctgtagctgccgatttccagaagaagaagaaggaggatgtgaactgtgaaatggaagtcaatagggctgttgggactttcttgaaaagaagcaaggaaatatgagtcatccgctatcacagctttcaaaagcaagaacaccatcctacataatacccaggattcccccaacacacgttcttttctaaatgccaatgagttggcctttaaaaatgcaccactttttttttttttttgacagggtctcactctgtcacccaggctggagtgcagtggcaccaccatggctctctgcagccttgacctctgggagctcaagtgatcctcctgcctcagtctcctgagtagctggaactacaaggaagggccaccacacctgactaacttttttgttttttgtttggtaaagatggcatttcaccatgttgtacaggctggtctcaaactcctaggttcactttggcctcccaaagtgctgggattacagacatgaactgccaggcccggccaaaataatgcaccacttttaacagaacagacagatgaggacagagctggtgataaaaaaaaaaaaaaaaaagcattttctagataccacttaacaggtttgagctagtttttttgaaatccaaagaaaattatagtttaaattcaattacatagtccagtggtccaactataattataatcaaaatcaatgcaggtttgttttttggtgctaatatgacatatgacaataagccacgaggtgcagtaagtacccgactaaagtttccgtgggttctgtcatgtaacacgacatgctccaccgtcaggggggagtatgagcagagtgcctgagtttagggtcaaggacaaaaaacctcaggcctggaggaagttttggaaagagttcaagtgtctgtatatcctatggtcttctccatcctcacaccttctgcctttgtcctgctcccttttaagccaggttacattctaaaaattcttaacttttaacataatattttataccaaagccaataaatgaactgcatatgaaaaaaaaaaaaaaaaaaaaaaaaaaaaaaaaaaaaaaaaaaaaaaaaaaaa

SEQ ID NO: 539 - protein, 255 aa, Homo sapien
MGNSCYNIVATLLLVLNFERTRSLQDPCSNCPAGTFCDNNRNQICSPCPPNSFSSAGGQRTCDICRQCKGVFRTRKECSSTSNAECDCTPGFHCLGAGCSMCEQDCKQGQELTKKGCKDCCFGTFNDQKRGICRPWTNCSLDGKSVLVNGTKERDVVCGPSPADLSPGASSVTPPAPAREPGHSPQIISFFLALTSTALLFLLFFLTLRFSVVKRGRKKLLYIFKQPFMRPVQTTQEEDGCSCRFPEEEEGGCEL

SEQ ID NO: 540 - DNA, 4678 bp, Homo sapien
acggctgcgagaagacgacagaaggggagaggtgaatattattgaatgaaaatggctgacagaagtgggaagattattccaggacaagtgtatattgaggtggaatatgattatgaatatgaagcaaaggacagaaagattgtgataaaacaaggggagaggtacatcttggtgaaaaagaccaatgatgactggtggcaagtcaagccagatgaaaactccaaagcgttttatgtgccagcccagtatgtgagggaggtcacgcgcaaagctctcatgccacctgttaagcaggtagctggtctgccaaataactccacgaaaataatgcagagtttgcatcttcagagatcaacagaaaatgtgaacaaattgcctgagctttcaagtttcggaaagccatcgtcatctgttcaaggaacaggtcttattcgtgatgccaatcagaattttggacccagttataatcaaggtcagactgtcaacctaagcctggacctgacccataataacggaaagtttaacaatgactcacattctcctaaagtttccagccagaataggacacgctcatttggtcattttcccggtccagagttcttggatgtagagaaaactagcttctcccaggaacaatcttgtgattccgcaggagaaggctctgaaagaatacatcaagattctgaatctggtgatgaacttagcagcagctccactgaacagataagggcaaccacacctccaaatcaaggaaggccagattctcctgtctatgctaaccttcaagaactgaaaatatcccagtctgctcttcccccacttcctgggagcccggcaattcagattaatggagaatgggaaactcataaagacagctcagggcgttgctattactataacagagggacacaggaaagaacttggaaacctcctcgttggacccgggatgcaagcatcagcaaaggagatttccaaaatccaggggatcaagagtggctcaagcatgttgatgatcaaggtagacaatattactacagtgcagacggatctcggtcagaatgggaattgccaaagtataatgcttcatcccagcagcaaagagaaataattaaaagtaggagcctggacaggcggctgcaagaaccaatagtattaacaaagtggagacatagcaccattgtattggacactaatgataaggaatctccaactgcctcaaaaccctgctttcctgaaaatgagtcttctccctcctcaccaaagcaccaagatacagatcaagagaaatatggattattaaatgtaacaaaaattgctgaaaatgggaaaaaggttcgaaagaactggttgtcttcttgggcggtgttgcagggttcatctttactttttaccaaaactcaaggaagtagcacaagttggtttggcagtaatcagtccaaaccagagttcacagtggacctcaagggggcaacaattgagatggcttcaaaggataaatccagcaaaaagaatgtatttgagctgaaaactcgtcaaggaacagaactgctaattcagtctgacaatgacactgttattaatgattggtttaaagttcttagtagtacaatcaataatcaggcagtagaaactgatgaaggaattgaagaggagataccggattcaccaggaatagaaaagcatgataaagaaaaggaacaaaaggatcccaaaaagcttcgttcctttaaagtatctagcatagattcttcagaacagaaaaaaaccaagaaaaacttaaagaagtttcttacacgacgccccactttgcaagctgttcgtgaaaaaggttatattaaagatcaggtatttggatccaatctcgctaatctgtgtcagagagagaatggcacagtaccaaagtttgtgaagttatgtattgaacatgttgaagaacatggtttggatattgatgggatatacagagtaagtggcaacctcgcagtgatccagaaactaaggtttgcagtcaatcatgatgagaaattggacttgaatgacagtaaatgggaagatattcatgtcattactggagccctcaaaatgttttttcgagaattaccagaacctctttttacatttaatcattttaatgattttgttaatgcaattaagcaagaaccaagaccgcgagtcgctgctgttaaggacctaatcagacagttgccaaagccaaaccaagacacaatgcagattcttttccgacatctcagaagagttatagaaaatggagagaaaaatcgaatgacctatcagagtatagcaattgtttttggtcccactctattaaaaccagaaaaagagactggtaatatagcagttcatactgtgtaccagaatcagattgtagaattaattcttctggaactgagttccatcttcggacgttgattcttactgaagacaacctgtggaatagaagctggattccatcagatttcaaatgtttatacacaatgtattttattttttggaccaagcagtgactctttgattttgcactttttttttgagggatcagaagggaaggggagagtcgagatgtgtgttaggccctcatatttgctgctttgttgcaagttgatataactgcgtgtaattatgaattcattttatcctgaatgtttgcatttcatactctgaatttcagtaaaaatcaaaacttaaaattctaaccagtcatatacactggataatttggtaagaaaactgtattttttttccctgaaattggataatgtactttcttctcaagattcatgacttgatagaacaatactttcagttatgttgcaaaggctcttgggcattttaaacaaaatgaagtatatccattttgaaacctgtgtatttctttttcggggtttctgcatgcagtggcagtcttaagtgccaaaattcattataaccccaaaataaccccttgatgaaggcttgctgtcttttactgtgttacacagcatccttactggatatcttagttgcttgtttgggcagcacactaatattacttaaaacactgtgatatactggagttttagttagcggaagtcagttcagggcattttagggctgtcttgctatactgaattgtagctaacaatcctaattatatctagtaccatactgagttattggtatgaccctgtggaaacacacattattttatgtaaatataggctaaagacttaatgtcctttagcttgtgtatataattgtgttgtatagtctcagagtacattctaaccctacatttctaatcattgttattggtaatcttttctgtgaatattaggtttcctccagaaatagtccgttatttgggaaagttaactgtgtgcacttttagatattaactacatttacaggcaaatcactgtaatgagaatggtactggaaaaatactgaatagacttgctaaatggcacatgcactacaagaggaaccttttgggttatttaatatgtacagaaaacattagaaaaaatttattacagaattctaattccagtatgaatagtggaaacccacctgtaaattagatggatgttggatggaaaatgacattgctaaatttgagaatttctttttacctactaatgtagattgctttgtataataaaacacagggtttggaaggttttgttacagggagcatggtctgttgaagatttttaaaatgtatttttctagattaacttctgtacatgaaatgtctaataaaactctaagaggcttagagatttttccattggaaatgtgcattttggtttctaatttttttgttttttcatttactggcatactgttatacctcatttttaaaaatcaactgaatccaatatttcctgtggcaaataacactttcctcatttcataccttttctcctctcttccatgccaacatttctccacccacaacgtacactttttatttctccatcaatatttgaaagcgagtgatttgtgaccaggatttttttttcttagggttgcatttataatttacagattgccttccttgggaacaagtatttttttgtatgatctgtctaaaaacctctcacctgaattttgtggtagaaagtctgtatttgttgttgtgagcgtgttaaattgataacaaaccaaactacttgatagctaaagcagattgtttcgggtggggagaaaaagccctaaatcagaatgtttatatttgcctaaagttgtccttaataatacaatatgctttagatcttgcttatttagtgattgtataccaggaaaacaattagactcaaatcagtgatgttcttgttcttggtgttcatgaacatatatcaaagattaaaattgtcctgtgtttcttgtttcaaggtacgtgtgtgtgtgtgtgtgtgtgtgtgtgtgtgtgtgtgtgtgaagtcttaaatgttttattagtctacagctaatcagtttattgtaatattgtatgtacagtgagattaatgtcttgcgttttcatcctttgtgaattaaaaattctcacttgttttgtaataacaaagctagtaatattttcctgtcttgacagcttggttttatagtagaaaatatattaaaagctgaaataaattatcagtggaattttaaaaaagaaaaaaaaaaaaaaaaa

SEQ ID NO: 541 - protein, 794 aa, Homo sapien
MKMADRSGKIIPGQVYIEVEYDYEYEAKDRKIVIKQGERYILVKKTNDDWWQVKPDENSKAFYVPAQYVREVTRKALMPPVKQVAGLPNNSTKIMQSLHLQRSTENVNKLPELSSFGKPSSSVQGTGLIRDANQNFGPSYNQGQTVNLSLDLTHNNGKFNNDSHSPKVSSQNRTRSFGHFPGPEFLDVEKTSFSQEQSCDSAGEGSERIHQDSESGDELSSSSTEQIRATTPPNQGRPDSPVYANLQELKISQSALPPLPGSPAIQINGEWETHKDSSGRCYYYNRGTQERTWKPPRWTRDASISKGDFQNPGDQEWLKHVDDQGRQYYYSADGSRSEWELPKYNASSQQQREIIKSRSLDRRLQEPIVLTKWRHSTIVLDTNDKESPTASKPCFPENESSPSSPKHQDTDQEKYGLLNVTKIAENGKKVRKNWLSSWAVLQGSSLLFTKTQGSSTSWFGSNQSKPEFTVDLKGATIEMASKDKSSKKNVFELKTRQGTELLIQSDNDTVINDWFKVLSSTINNQAVETDEGIEEEIPDSPGIEKHDKEKEQKDPKKLRSFKVSSIDSSEQKKTKKNLKKFLTRRPTLQAVREKGYIKDQVFGSNLANLCQRENGTVPKFVKLCIEHVEEHGLDIDGIYRVSGNLAVIQKLRFAVNHDEKLDLNDSKWEDIHVITGALKMFFRELPEPLFTFNHFNDFVNAIKQEPRPRVAAVKDLIRQLPKPNQDTMQILFRHLRRVIENGEKNRMTYQSIAIVFGPTLLKPEKETGNIAVHTVYQNQIVELILLELSSIFGR

SEQ ID NO: 542 - DNA, 1431 bp, Homo sapien
atgaccatggaaacagttgaatcccagcatgatggaagtataacagcttctttgacagagagcaagtctgctcatgtgcagactcagactgggcaaatttcaatccctgctttagctcagtgcagtgagctgagatcaggcaccagaagaggctccccagctgtaactctagtgcagttaccttcgggccaaactatacatgtccagggagtaattcagacaccacagccatgggttattcagtcatcagaaatacacaccgttcaggtagcagcaattgcagagacagatgaatctgcagaatcagaaggtgtaattgattctcataaacgtagagaaatcctttcacgaagaccctcttataggaaaatactgaatgaactgtcctctgatgtgcctggtgttcccaagattgaagaagagagatcagaggaagaaggaacaccacctagtattgctaccatggcagtaccaactagcatatatcagactagcacggggcaatacattgctatagcccaaggtggaacaatccagatttctaacccaggatctgatggtgttcagggactgcaggcattaacaatgacaaattcaggagctcctccaccaggtgctacaattgtacagtacgcagcacaatcagctgatggcacacagcagttctttgtcccaggcagccaggttgttgttcaagctgccactggtgacatgccaacttaccagatccgagctcctactgctgctttgccacagggagtggtgatggctgcatcgcccggaagtttgcacagtccccagcagctggcagaagaagcaacacgcaaacgagagctgaggctaatgaaaaacagagaagctgcccgggagtgtcgcaggaagaagaaagaatatgtcaaatgtcttgaaaatcgtgtggctgtgcttgaaaaccaaaacaagactctcattgaggaactcaaggccctcaaagatctttattgccataaagtagagtaactgtctttgacttggaccttgtttactctaatcaaggcaggagatgcagcagtcctacttattgccatgtggacttgtgggaaggacacgtgtgacccttaagaatccagtttggattagtgtttgaaattgaattgggaatgttgttccaggatgtggaatgcagcgtgatcacacttaccgagcttactttgatctgtttgtcaatagcatgcaaaaaatgctttgtttgccctttgcttctgctttttttcagggaagctgccaaagaatgtcgacgtcgaaagaaagaatatgtaaaatgcctggagagccgagttgcagtgctggaagtccagaacaagaagcttatagaggaacttgaaaccttgaaagacatttgttctcccaaaactgattactagaaatatttaactatgaactgattacaga

SEQ ID NO: 543 - protein, 332 aa, Homo sapien
MTMETVESQHDGSITASLTESKSAHVQTQTGQISIPALAQCSELRSGTRRGSPAVTLVQLPSGQTIHVQGVIQTPQPWVIQSSEIHTVQVAAIAETDESAESEGVIDSHKRREILSRRPSYRKILNELSSDVPGVPKIEEERSEEEGTPPSIATMAVPTSIYQTSTGQYIAIAQGGTIQISNPGSDGVQGLQALTMTNSGAPPPGATIVQYAAQSADGTQQFFVPGSQVVVQAATGDMPTYQIRAPTAALPQGVVMAASPGSLHSPQQLAEEATRKRELRLMKNREAARECRRKKKEYVKCLENRVAVLENQNKTLIEELKALKDLYCHKVE

SEQ ID NO: 544 - DNA, 1272 bp, Homo sapien
gaattcggccaaagaggcctatgcttctctgaagacttgcagcaaggcttgctgaggctcacagaagatagccccagtgttttggagtggttttgaatgtgattctgagatcagactgactgagctggaatcctggctttatatcttaccagctacacaaccttggagtcttagaaattttttcttttcaataagcagtcatccttactttccctcaagatgacaaacagttcgttcttctgcccagtttataaagatctggagccattcacgtattttttttatttagttttccttgttggaattattggaagttgttttgcaacctgggcttttatacagaagaatacgaatcacaggtgtgtgagcatctacttaattaatttgcttacagccgatttcctgcttactctggcattaccagtgaaaattgttgttgacttgggtgtggcaccttggaagctgaagatattccactgccaagtaacagcctgcctcatctatatcaatatgtatttatcaattatcttcttagcatttgtcagcattgaccgctgtcttcagctgacacacagctgcaagatctaccgaatacaagaacccggatttgccaaaatgatatcaaccgttgtgtggctaatggtccttcttataatggtgccaaatatgatgattcccatcaaagacatcaaggaaaagtcaaatgtgggttgtatggagtttaaaaaggaatttggaagaaattggcatttgctgacaaatttcatatgtgtagcaatatttttaaatttctcagccatcattttaatatccaattgccttgtaattcgacagctctacagaaacaaagataatgaaaattacccaaatgtgaaaaaggctctcatcaacatacttttagtgaccacgggctacatcatatgctttgttccttaccacattgtccgaatcccgtataccctcagccagacagaagtcataactgattgctcaaccaggatttcactcttcaaagccaaagaggctacactgctcctggctgtgtcgaacctgtgctttgatcctatcctgtactatcacctctcaaaagcattccgctcaaaggtcactgagacttttgcctcacctaaagagaccaaggctcagaaagaaaaattaagatgtgaaaataatgcataaaagacaggattttttgtgctaccaattctggccttactggaccataaagttaattatagctttgaaagataaaaaaaaaaaaaaagcggccgc

SEQ ID NO: 545 - protein, 319 aa, Homo sapien
MTNSSFFCPVYKDLEPFTYFFYLVFLVGIIGSCFATWAFIQKNTNHRCVSIYLINLLTADFLLTLALPVKIVVDLGVAPWKLKIFHCQVTACLIYINMYLSIIFLAFVSIDRCLQLTHSCKIYRIQEPGFAKMISTVVWLMVLLIMVPNMMIPIKDIKEKSNVGCMEFKKEFGRNWHLLTNFICVAIFLNFSAIILISNCLVIRQLYRNKDNENYPNVKKALINILLVTTGYIICFVPYHIVRIPYTLSQTEVITDCSTRISLFKAKEATLLLAVSNLCFDPILYYHLSKAFRSKVTETFASPKETKAQKEKLRCENNA

SEQ ID NO: 546 - DNA, 1900 bp, Homo sapien
gaattcggcacgagtcagggaagcagccccggcggccagcagggagctcaggacagagcaggctccctgggaagcctccgggtgataggggtgttccagctgcggcgctctgggggttcagagggggatcttgaatgaacaaatgaatgaactgctttctgggcaaacagccacagccagaggagcctgtgattggcagaaagaagccagggtgtgcaagtctccccaacagcctcgagtggcctgcagtcacagggaaccctcaggaagaccttccgggcagagaccagagggaagcccatctctccagcagaactgcttggatttttctaccaggaggctcagggctctgcaacaatgatagcagaagctgatggcatctagagatctaggctgggactagcacagcatcacttctaccactttctgttggtcacagcaactcaccatgccagtgcagattcaaggggaggagaaatagagtccacttcttgatgggaggcgtgacatagaatggaggatgaagattacaacacttccatcagttacggtgatgaataccctgattatttagactccattgtggttttggaggacttatcccccttggaagccagggtgaccaggatcttcctggtggtggtctacagcatcgtctgcttcctcgggattctgggcaatggtctggtgatcatcattgccaccttcaagatgaagaagacagtgaacatggtctggttcctcaacctggcagtggcagatttcctgttcaacgtcttcctcccaatccatatcacctatgccgccatggactaccactgggttttcgggacagccatgtgcaagatcagcaacttccttctcatccacaacatgttcaccagcgtcttcctgctgaccatcatcagctctgaccgctgcatctctgtgctcctccctgtctggtcccagaaccaccgcagcgttcgcctggcttacatggcctgcatggtcatctgggtcctggctttcttcttgagttccccatctctcgtcttccgggacacagccaacctgcatgggaaaatatcctgcttcaacaacttcagcctgtccacacctgggtcttcctcgtggcccactcactcccaaatggaccctgtggggtatagccggcacatggtggtgactgtcacccgcttcctctgtggcttcctggtcccagtcctcatcatcacagcttgctacctcaccatcgtgtgcaaactgcagcgcaaccgcctggccaagaccaagaagcccttcaagattattgtgaccatcatcattaccttcttcctctgctggtgcccctaccacacactcaacctcctagagctccaccacactgccatgcctggctctgtcttcagcctgggtttgcccctggccactgcccttgccattgccaacagctgcatgaaccccattctgtatgttttcatgggtcaggacttcaagaagttcaaggtggccctcttctctcgcctggtcaatgctctaagtgaagatacaggccactcttcctaccccagccatagaagctttaccaagatgtcatcaatgaatgagaggacttctatgaatgagagggagaccggcatgctttgatcctcactgtggaacccctcaatggactctctcaacccagggacacccaaggatatgtcttctgaagatcaaggcaagaacctctttagcatccaccaattttcactgcattttgcatgggatgaacagtgttttatgctgggaatctagggcctggaacccctttcttctagtggacagaacatgctgtgttccatacagccttggactagcaatttatgcttcttgggaggccagccttgactgactcaaagcaaaaaaggaagaattc

SEQ ID NO: 547 - protein, 371 aa, Homo sapien
MEDEDYNTSISYGDEYPDYLDSIVVLEDLSPLEARVTRIFLVVVYSIVCFLGILGNGLVIIIATFKMKKTVNMVWFLNLAVADFLFNVFLPIHITYAAMDYHWVFGTAMCKISNFLLIHNMFTSVFLLTIISSDRCISVLLPVWSQNHRSVRLAYMACMVIWVLAFFLSSPSLVFRDTANLHGKISCFNNFSLSTPGSSSWPTHSQMDPVGYSRHMVVTVTRFLCGFLVPVLIITACYLTIVCKLQRNRLAKTKKPFKIIVTIIITFFLCWCPYHTLNLLELHHTAMPGSVFSLGLPLATALAIANSCMNPILYVFMGQDFKKFKVALFSRLVNALSEDTGHSSYPSHRSFTKMSSMNERTSMNERETGML

SEQ ID NO: 548 - DNA, 2903 bp, Homo sapien
tgaaggctggttgttcagactgagcttcctgcctgcctgtaccccgccaacagcttcagaagaaggtgactggtggctgcctgaggaataccagtgggcaagagaattagcatttctggagcatctgctgtctgagcagcccctgggtgcgtccactttctgggcacgtgaggttgggccttggccgcctgagcccttgagttggtcacttgaaccttgggaatattgagattatattctcctgccttttaaaaagatggacttcagcagaaatctttatgatattggggaacaactggacagtgaagatctggcctccctcaagttcctgagcctggactacattccgcaaaggaagcaagaacccatcaaggatgccttgatgttattccagagactccaggaaaagagaatgttggaggaaagcaatctgtccttcctgaaggagctgctcttccgaattaatagactggatttgctgattacctacctaaacactagaaaggaggagatggaaagggaacttcagacaccaggcagggctcaaatttctgcctacaggttccacttctgccgcatgagctgggctgaagcaaacagccagtgccagacacagtctgtacctttctggcggagggtcgatcatctattaataagggtcatgctctatcagatttcagaagaagtgagcagatcagaattgaggtcttttaagtttcttttgcaagaggaaatctccaaatgcaaactggatgatgacatgaacctgctggatattttcatagagatggagaagagggtcatcctgggagaaggaaagttggacatcctgaaaagagtctgtgcccaaatcaacaagagcctgctgaagataatcaacgactatgaagaattcagcaaaggggaggagttgtgtggggtaatgacaatctcggactctccaagagaacaggatagtgaatcacagactttggacaaagtttaccaaatgaaaagcaaacctcggggatactgtctgatcatcaacaatcacaattttgcaaaagcacgggagaaagtgcccaaacttcacagcattagggacaggaatggaacacacttggatgcaggggctttgaccacgacctttgaagagcttcattttgagatcaagccccacgatgactgcacagtagagcaaatctatgagattttgaaaatctaccaactcatggaccacagtaacatggactgcttcatctgctgtatcctctcccatggagacaagggcatcatctatggcactgatggacaggaggcccccatctatgagctgacatctcagttcactggtttgaagtgcccttcccttgctggaaaacccaaagtgttttttattcaggcttgtcagggggataactaccagaaaggtatacctgttgagactgattcagaggagcaaccctatttagaaatggatttatcatcacctcaaacgagatatatcccggatgaggctgactttctgctggggatggccactgtgaataactgtgtttcctaccgaaaccctgcagagggaacctggtacatccagtcactttgccagagcctgagagagcgatgtcctcgaggcgatgatattctcaccatcctgactgaagtgaactatgaagtaagcaacaaggatgacaagaaaaacatggggaaacagatgcctcagcctactttcacactaagaaaaaaacttgtcttcccttctgattgatggtgctattttgtttgttttgttttgttttgtttttttgagacagaatctcgctctgtcgcccaggctggagtgcagtggcgtgatctcggctcaccgcaagctccgcctcccgggttcaggccattctcctgcctcagcctcccgagtagctgggactacaggggcccgccaccacacctggctaattttttaaaaatatttttagtagagacagggtttcactgtgttagccagggtggtcttgatctcctgacctcgtgatccacccacctcggcctcccaaagtgctgggattacaggcgtgagccaccgcgcctggccgatggtactatttagatataacactatgtttatttactaattttctagattttctactttattaattgttttgcacttttttataagagctaaagttaaataggatattaacaacaataacactgtctcctttctcttacgcttaaggctttgggaatgtttttagctggtggcaataaataccagacacgtacaaaatccagctatgaatatagagggcttatgattcagattgttatctatcaactataagcccactgttaatattctattaactttaattctctttcaaagctaaattccacactaccacattaaaaaaattagaaagtagccacgtatggtggctcatgtctataatcccagcactttgggaggttgaggtgggaggatttgcttgaacccaagaggtccaaggctgcagtgagccatgttcacaccgctgcactcaagcttgggtgacagagcaagaccccgtccccaaaaaaattttttttttaataaacccaaatttgtttgaaaacttttaaaaattcaaatgatttttacaagttttaaataagctctccccaaacttgctttatgccttcttattgcttttatgatatatatatgcttggctaactatatttgctttttgctaacaatgctctggggtctttttatgcatttgcatttgctctttcatctctgcttggattattttaaatcattaggaattaagttatctttaaaatttaagtatcttttttccaaaacattttttaatagaataaaatataatttgatcttaaaaaaaaaaaaaaaaaaaaaaaaaaaaaaaaaaaaaaaa

SEQ ID NO: 549 - protein, 496 aa, Homo sapien
MDFSRNLYDIGEQLDSEDLASLKFLSLDYIPQRKQEPIKDALMLFQRLQEKRMLEESNLSFLKELLFRINRLDLLITYLNTRKEEMERELQTPGRAQISAYRFHFCRMSWAEANSQCQTQSVPFWRRVDHLLIRVMLYQISEEVSRSELRSFKFLLQEEISKCKLDDDMNLLDIFIEMEKRVILGEGKLDILKRVCAQINKSLLKIINDYEEFSKGEELCGVMTISDSPREQDSESQTLDKVYQMKSKPRGYCLIINNHNFAKAREKVPKLHSIRDRNGTHLDAGALTTTFEELHFEIKPHDDCTVEQIYEILKIYQLMDHSNMDCFICCILSHGDKGIIYGTDGQEAPIYELTSQFTGLKCPSLAGKPKVFFIQACQGDNYQKGIPVETDSEEQPYLEMDLSSPQTRYIPDEADFLLGMATVNNCVSYRNPAEGTWYIQSLCQSLRERCPRGDDILTILTEVNYEVSNKDDKKNMGKQMPQPTFTLRKKLVFPSD

SEQ ID NO: 550 - DNA, 1705 bp, Homo sapien
gtttttttcccttctgagcaatggagcttaccatctttatcctgagactggccatttacatcctgacatttcccttgtacctgctgaactttctgggcttgtggagctggatatgcaaaaaatggttcccctacttcttggtgaggttcactgtgatatacaacgaacagatggcaagcaagaagcgggagctcttcagtaacctgcaggagtttgcgggcccctccgggaaactctccctgctggaagtgggctgtggcacgggggccaacttcaagttctacccacctgggtgcagggtgacctgtattgaccccaaccccaactttgagaagtttttgatcaagagcattgcagagaaccgacacctgcagtttgagcgctttgtggtagctgccggggagaacatgcaccaggtggctgatggctctgtggatgtggtggtctgcaccctggtgctgtgctctgtgaagaaccaggagcggattctccgcgaggtgtgcagagtgctgagaccgggaggggctttctatttcatggagcatgtggcagctgagtgttcgacttggaattacttctggcaacaagtcctggatcctgcctggcaccttctgtttgatgggtgcaacctgaccagagagagctggaaggccctggagcgggccagcttctctaagctgaagctgcagcacatccaggccccactgtcctgggagttggtgcgccctcatatctatggatatgctgtgaaatagtgtgagctggcagttaagagctgaatggctcaaagaatttaaagcttcagttttacatttaaaatgctaagtgggagaagagaaaccttttttttggggggcggtttttttggtttgttgttggttttttttttttttttggcaagactccgtctcaaaaaaaaaaaaaaaaaaaaaaagaagtagagacagggagacagggtctcactgtgttgcctaggccggtcttgaactcctgggctcaagtgattctcccaccttgacctcctaaattgttgggattacaggtgtgagacagtgcacctggccgaaatagctcaagtttctgaaaaacaaatctgaatctatttgttattcttagcgtcactggtctggctttcagaattaacatacaaggttgccacacctagttctgcccagctttatgtcttttattccagtattccaccaaagtttgttttcctgcattccagttctcaagtcttaagataaagattgtacttgacagtttagtatatccataaaactatttgaggtggttaaggttcttgggttcattttccttaatactttgctgaatattgtagattgtaggcaatgaaaaagtctactaaattaggaaaaccttgaataattaggtatcctaggtaagagcccctaaacatcaagcaatctgtgagtctgtaaagaaataaatattttttggattattcttatctaattccacccctgttggaagatgatttctttgttctttgcaactatggaagctgtgaaaatcatcacaagtgcctctgaaagcgagtgttaggttggttagagggtttaatattttctgcaatggtttgtaggaattttaataaatgtagtatattttctgagatgattttgtaaaagtactattttaaatatcaaatcaaccaataaattcacatttgtgttaggaacag

SEQ ID NO: 551 - protein, 244 aa, Homo sapien
MELTIFILRLAIYILTFPLYLLNFLGLWSWICKKWFPYFLVRFTVIYNEQMASKKRELFSNLQEFAGPSGKLSLLEVGCGTGANFKFYPPGCRVTCIDPNPNFEKFLIKSIAENRHLQFERFVVAAGENMHQVADGSVDVVVCTLVLCSVKNQERILREVCRVLRPGGAFYFMEHVAAECSTWNYFWQQVLDPAWHLLFDGCNLTRESWKALERASFSKLKLQHIQAPLSWELVRPHIYGYAVK

SEQ ID NO: 552 - DNA, 1903 bp, Homo sapien
gggcaacggaggggaaataaaagggaacggctccgaatctgccccagcggccgctgcgagacctcggcgccgacatcgcgacagcgaagcgctttgcacgccaggaaggtcccctctatgtgctgctgagccggtcctggacgcgacgagcccgccctcggtcttcggagcagaattcgcaaaaacggaaggactggaaatggcagaccatatgatggcaatgaaccacgggcgcttccccgacggcaccaatgggctgcaccatcaccctgcccaccgcatgggcatggggcagttcccgagcccccatcaccaccagcagcagcagccccagcacgccttcaacgccctaatgggcgagcacatacactacggcgcgggcaacatgaatgccacgagcggcatcaggcatgcgatggggccggggactgtgaacggagggcaccccccgagcgcgctggcccccgcggccaggtttaacaactcccagttcatgggtcccccggtggccagccagggaggctccctgccggccagcatgcagctgcagaagctcaacaaccagtatttcaaccatcacccctacccccacaaccactacatgccggatttgcaccctgctgcaggccaccagatgaacgggacaaaccagcacttccgagattgcaaccccaagcacagcggcggcagcagcacccccggcggctcgggcggcagcagcacccccggcggctctggcagcagctcgggcggcggcgcgggcagcagcaacagcggcggcggcagcggcagcggcaacatgcccgcctccgtggcccacgtccccgctgcaatgctgccgcccaatgtcatagacactgatttcatcgacgaggaagttcttatgtccttggtgatagaaatgggtttggaccgcatcaaggagctgcccgaactctggctggggcaaaacgagtttgattttatgacggacttcgtgtgcaaacagcagcccagcagagtgagctgttgactcgatcgaaaccccggcgaaagaaatcaaacccccaacttcttcggcgtgaattaaaagaaacattcccttagacacagtatctcacttttcagatcttgaaaggtttgagaacttggaaacaaagtaaactataaacttgtacaaattggttttaaaaaaaattgctgccactttttttcctgtttttgtttcgtttttgtagccttgacattcacccacctcccttatgtagttgaaatatctagctaacttggtctttttcgttgtttgtttttactcctttccctcactttctccagtgctcaactgttagatattaatcttggcaaactgcttaatcttgtggattttgtagatggtttcaaatgactgaactgcattcagatttacgagtgaaaggaaaaattgcattagttggttgcatgaacttcgaagggcagatattactgcacaaactgccatctcgcttcatttttttaactatgcatttgagtacagactaatttttaaaatatgctaaactggaagattaaacagatgtgggccaaactgttctggatcaggaaagtcatactgttcactttcaagttggctgtcccccccgccgccccccccacccccatatgtacagatgataatagggtgtggaatgtcgtcagtggcaaacatttcacagatttttattttgtttctgtcttcaacatttttgacactgtgctaatagttatattcagtacatgaaaagatactactgtgttgaaagctttttaggaaattttgacagtatttttgtacaaaacatttttttgaaaaaatacttgttaatttattctattttaatttgccaatgtcaataaaaagttaagaaaaaaaaaaaaaaaaaaaaaa

SEQ ID NO: 553 - protein, 270 aa, Homo sapien
MADHMMAMNHGRFPDGTNGLHHHPAHRMGMGQFPSPHHHQQQQPQHAFNALMGEHIHYGAGNMNATSGIRHAMGPGTVNGGHPPSALAPAARFNNSQFMGPPVASQGGSLPASMQLQKLNNQYFNHHPYPHNHYMPDLHPAAGHQMNGTNQHFRDCNPKHSGGSSTPGGSGGSSTPGGSGSSSGGGAGSSNSGGGSGSGNMPASVAHVPAAMLPPNVIDTDFIDEEVLMSLVIEMGLDRIKELPELWLGQNEFDFMTDFVCKQQPSRVSC

SEQ ID NO: 554 - DNA, 2186 bp, Homo sapien
acacggaccaaggagtctaacacgtgcgcgagtcgggggctcgcacgaaagccgccgtggcgcaatgaaggtgaaggccggcgcgctcgccggccgaggtgggatcccgaggcctctccagtccgccgagggcgcaccaccggcccgtctcgcccgccgcgccggggaggtggagcacgagcgcacgtgttaggacccgaaagatggtgaactatgcctgggcagggcgaagccagaggaaactctggtggaggtccgtagcggtcctgacgtgcaaatcggtcgtccgacctgggtataggggcgggctccaggcgaggcggtcgacgctcctgaaaacttgcgcgcgcgctcgcgccactgcgcccggagcgatgaagatggtcgcgccctggacgcggttctactccaacagctgctgcttgtgctgccatgtccgcaccggcaccatcctgctcggcgtctggtatctgatcatcaatgctgtggtactgttgattttattgagtgccctggctgatccggatcagtataacttttcaagttctgaactgggaggtgactttgagttcatggatgatgccaacatgtgcattgccattgcgatttctcttctcatgatcctgatatgtgctatggctacttacggagcgtacaagcaacgcgcagcctggatcatcccattcttctgttaccagatctttgactttgccctgaacatgttggttgcaatcactgtgcttatttatccaaactccattcaggaatacatacggcaactgcctcctaattttccctacagagatgatgtcatgtcagtgaatcctacctgtttggtccttattattcttctgtttattagcattatcttgacttttaagggttacttgattagctgtgtttggaactgctaccgatacatcaatggtaggaactcctctgatgtcctggtttatgttaccagcaatgacactacggtgctgctacccccgtatgatgatgccactgtgaatggtgctgccaaggagccaccgccaccttacgtgtctgcctaagccttcaagtgggcggagctgagggcagcagcttgactttgcagacatctgagcaatagttctgttatttcacttttgccatgagcctctctgagcttgtttgttgctgaaatgctactttttaaaatttagatgttagattgaaaactgtagttttcaacatatgctttgctagaacactgtgatagattaactgtagaattcttcctgtacgattggggatataatgggcttcactaaccttccctaggcattgaaacttcccccaaatctgatggacctagaagtctgcttttgtacctgctgggccccaaagttgggcatttttctctctgttccctctcttttgaaaatgtaaaataaaaccaaaaatagacaactttttcttcagccattccagcatagagaacaaaaccttatggaaacaggaatgtcaattgtgtaatcattgttctaattaggtaaatagaagtccttatgtatgtgttacaagaatttcccccacaacatcctttatgactgaagttcaatgacagtttgtgtttgggtggtaaaggattttctccatggcctgaattaagaccattagaaagcaccaggccgtgggagcagtgaccatctgctgactgttcttgtggatcttgtgtccagggacatggggtgacatgcctcgtatgtgttagagggtggaatggatgtgtttggcgctgcatgggatctggtgcccctcttctcctggattcacatccccacccagggcccgcttttactaagtgttctgccctagattggttcaaggaggtcatccaactgactttatcaagtggaattgggatatatttgatatacttctgcctaacaacatggaaaagggttttcttttccctgcaagctacatcctactgctttgaacttccaagtatgtctagtcaccttttaaaatgtaaacattttcagaaaaatgaggattgccttccttgtatgcgctttttaccttgactacctgaattgcaagggatttttatatattcatatgttacaaagtcagcaactctcctgttggttcattattgaatgtgctgtaaattaagttgtttgcaattaaaacaaggtttgcccacaaaaaaaaaa

SEQ ID NO: 555 - protein, 283 aa, Homo sapien
MVNYAWAGRSQRKLWWRSVAVLTCKSVVRPGYRGGLQARRSTLLKTCARARATAPGAMKMVAPWTRFYSNSCCLCCHVRTGTILLGVWYLIINAVVLLILLSALADPDQYNFSSSELGGDFEFMDDANMCIAIAISLLMILICAMATYGAYKQRAAWIIPFFCYQIFDFALNMLVAITVLIYPNSIQEYIRQLPPNFPYRDDVMSVNPTCLVLIILLFISIILTFKGYLISCVWNCYRYINGRNSSDVLVYVTSNDTTVLLPPYDDATVNGAAKEPPPPYVSA

SEQ ID NO: 556 - DNA, 1638 bp, Homo sapien
ggacaaccggctggggtccttgcgcgccgcggctcagggaggagcaccgactgcgccgcaccctgagagatggttggtgccatgtggaaggtgattgtttcgctggtcctgttgatgcctggcccctgtgatgggctgtttcgctccctatacagaagtgtttccatgccacctaagggagactcaggacagccattatttctcaccccttacattgaagctgggaagatccaaaaaggaagagaattgagtttggtcggccctttcccaggactgaacatgaagagttatgccggcttcctcaccgtgaataagacttacaacagcaacctcttcttctggttcttcccagctcagatacagccagaagatgccccagtagttctctggctacagggtgggccgggaggttcatccatgtttggactctttgtggaacatgggccttatgttgtcacaagtaacatgaccttgcgtgacagagacttcccctggaccacaacgctctccatgctttacattgacaatccagtgggcacaggcttcagttttactgatgatacccacggatatgcagtcaatgaggacgatgtagcacgggatttatacagtgcactaattcagtttttccagatatttcctgaatataaaaataatgacttttatgtcactggggagtcttatgcagggaaatatgtgccagccattgcacacctcatccattccctcaaccctgtgagagaggtgaagatcaacctgaacggaattgctattggagatggatattctgatcccgaatcaattatagggggctatgcagaattcctgtaccaaattggcttgttggatgagaagcaaaaaaagtacttccagaagcagtgccatgaatgcatagaacacatcaggaagcagaactggtttgaggcctttgaaatactggataaactactagatggcgacttaacaagtgatccttcttacttccagaatgttacaggatgtagtaattactataactttttgcggtgcacggaacctgaggatcagctttactatgtgaaatttttgtcactcccagaggtgagacaagccatccacgtggggaatcagacttttaatgatggaactatagttgaaaagtacttgcgagaagatacagtacagtcagttaagccatggttaactgaaatcatgaataattataaggttctgatctacaatggccaactggacatcatcgtggcagctgccctgacagagcgctccttgatgggcatggactggaaaggatcccaggaatacaagaaggcagaaaaaaaagtttggaagatctttaaatctgacagtgaagtggctggttacatccggcaagtgggtgacttccatcaggtaattattcgaggtggaggacatattttaccctatgaccagcctctgagagcttttgacatgattaatcgattcatttatggaaaaggatgggatccttatgttggataaactaccttcccaaaagagaacatcagaggttttcattgctgaaaagaaaatcgtaaaaacagaaaatgtcataggaataaaaaaattatcttttcatatctgcaagatttttttcatcaataaaaattatccttgaaa

SEQ ID NO: 557 - protein, 476 aa, Homo sapien
MVGAMWKVIVSLVLLMPGPCDGLFRSLYRSVSMPPKGDSGQPLFLTPYIEAGKIQKGRELSLVGPFPGLNMKSYAGFLTVNKTYNSNLFFWFFPAQIQPEDAPVVLWLQGGPGGSSMFGLFVEHGPYVVTSNMTLRDRDFPWTTTLSMLYIDNPVGTGFSFTDDTHGYAVNEDDVARDLYSALIQFFQIFPEYKNNDFYVTGESYAGKYVPAIAHLIHSLNPVREVKINLNGIAIGDGYSDPESIIGGYAEFLYQIGLLDEKQKKYFQKQCHECIEHIRKQNWFEAFEILDKLLDGDLTSDPSYFQNVTGCSNYYNFLRCTEPEDQLYYVKFLSLPEVRQAIHVGNQTFNDGTIVEKYLREDTVQSVKPWLTEIMNNYKVLIYNGQLDIIVAAALTERSLMGMDWKGSQEYKKAEKKVWKIFKSDSEVAGYIRQVGDFHQVIIRGGGHILPYDQPLRAFDMINRFIYGKGWDPYVG

SEQ ID NO: 558 - DNA, 3319 bp, Homo sapien
ctacctcttcctctccacgcggttgagaagaccggtcggcctgggcaacctgcgctgaagatgccgggaaaactccgtagtgacgctggtttggaatcagacaccgcaatgaaaaaaggggagacactgcgaaagcaaaccgaggagaaagagaaaaaaagagaagccaaaatctgataagactgaagagatagcagaagaggaagaaactgttttccccaaagctaaacaagttaaaaagaaagcagagccttctgaagttgacatgaattctcctaaatccaaaaaggcaaaaaagaaagaggagccatctcaaaatgacatttctcctaaaaccaaaagtttgagaaagaaaaaggagcccattgaaaagaaagtggtttcttctaaaaccaaaaaagtgacaaaaaatgaggagccttctgaggaagaaatagatgctcctaagcccaagaagatgaagaaagaaaaggaaatgaatggagaaactagagagaaaagccccaaactgaagaatggatttcctcatcctgaaccggactgtaaccccagtgaagctgccagtgaagaaagtaacagtgagatagagcaggaaatacctgtggaacaaaaagaaggcgctttctctaattttcccatatctgaagaaactattaaacttctcaaaggccgaggagtgaccttcctatttcctatacaagcaaagacattccatcatgtttacagcgggaaggacttaattgcacaggcacggacaggaactgggaagacattctcctttgccatccctttgattgagaaacttcatggggaactgcaagacaggaagagaggccgtgcccctcaggtactggttcttgcacctacaagagagttggcaaatcaagtaagcaaagacttcagtgacatcacaaaaaagctgtcagtggcttgtttttatggtggaactccctatggaggtcaatttgaacgcatgaggaatgggattgatatcctggttggaacaccaggtcgtatcaaagaccacatacagaatggcaaactagatctcaccaaacttaagcatgttgtcctggatgaagtggaccagatgttggatatgggatttgctgatcaagtggaagagattttaagtgtggcatacaagaaagattctgaagacaatccccaaacattgcttttttctgcaacttgccctcattgggtatttaatgttgccaagaaatacatgaaatctacatatgaacaggtggacctgattggtaaaaagactcagaaaacggcaataactgtggagcatctggctattaagtgccactggactcagagggcagcagttattggggatgtcatccgagtatatagtggtcatcaaggacgcactatcatcttttgtgaaaccaagaaagaagcccaggagctgtcccagaattcagctataaagcaggatgctcagtccttgcatggagacattccacagaagcaaagggaaatcaccctgaaaggttttagaaatggtagttttggagttttggtggcaaccaatgttgctgcacgtgggttagacatccctgaggttgatttggttatacaaagctctccaccaaaggatgtagagtcctacattcatcgatccgggcggacaggcagagctggaaggacgggggtgtgcatctgcttttatcagcacaaggaagaatatcagttagtacaagtggagcaaaaagcgggaattaagttcaaacgaataggtgttccttctgcaacagaaataataaaagcttccagcaaagatgccatcaggcttttggattccgtgcctcccactgccattagtcacttcaaacaatcagctgagaagctgatagaggagaagggagctgtggaagctctggcagcagcactggcccatatttcaggtgccacgtccgtagaccagcgctccttgatcaactcaaatgtgggttttgtgaccatgatcttgcagtgctcaattgaaatgccaaatattagttatgcttggaaagaacttaaagagcagctgggcgaggagattgattccaaagtgaagggaatggtttttctcaaaggaaagctgggtgtttgctttgatgtacctaccgcatcagtaacagaaatacaggagaaatggcatgattcacgacgctggcagctctctgtggccacagagcaaccagaactggaaggaccacgggaaggatatggaggcttcaggggacagcgggaaggcagtcgaggcttcaggggacagcgggacggaaacagaagattcagaggacagcgggaaggcagtagaggcccgagaggacagcgatcaggaggtggcaacaaaagtaacagatcccaaaacaaaggccagaagcggagtttcagtaaagcatttggtcaataattagaaatagaagatttatatagcaaaaagagaatgatgtttggcaatatagaactgaacattatttttcatgcaaagttaaaagcacattgtgcctccttttgaccacttgccaagtccctgtctctttcagacacagacaagcttcatttaaattatttcatctgatcattatcatttataactttattgttacttcatcagtttttccttttgaaaggtgtatgaattcattacatttttattctaatgtattatctgtagattagaagataaaatcaagcatgtatctgcctatactttgtgagttcacctgtctttatactcaaaagtgtcccttaatagtgtccttccctgaaataaatacctaagggagtgtaacagtctctggaggaccactttgagcctttggaagttaaggtttcctcagccacctgccgaacagtttctcatgtggtcctattatttgtctactgagacttaatactgagcaatgttttgaaacaagatttcaaactaatctgggttgtaatacagtttataccagtgtatgctctagacttggaagatgtagtatgtttgatgtggattacctatacttatgttcgttttgatacatttttagcttctcattataaggtgattcatgctttagtgaattcttcatagatagtatatataaaagtacattttaatagaaagccagggttttaaggaatttcacatgtataaggtggctccatagctttatttgtaagtaggctggataaatggtgcttaaatggtaatgtactccacttcttcctattggaagattaacattatttaccaagaaggacttaagggagtaaggggcgcagattagcattgctcaagagtatgtaaaaaaaaaaaaaaaaaaaaaaa

SEQ ID NO: 559 - protein, 715 aa, Homo sapien
MNSPKSKKAKKKEEPSQNDISPKTKSLRKKKEPIEKKVVSSKTKKVTKNEEPSEEEIDAPKPKKMKKEKEMNGETREKSPKLKNGFPHPEPDCNPSEAASEESNSEIEQEIPVEQKEGAFSNFPISEETIKLLKGRGVTFLFPIQAKTFHHVYSGKDLIAQARTGTGKTFSFAIPLIEKLHGELQDRKRGRAPQVLVLAPTRELANQVSKDFSDITKKLSVACFYGGTPYGGQFERMRNGIDILVGTPGRIKDHIQNGKLDLTKLKHVVLDEVDQMLDMGFADQVEEILSVAYKKDSEDNPQTLLFSATCPHWVFNVAKKYMKSTYEQVDLIGKKTQKTAITVEHLAIKCHWTQRAAVIGDVIRVYSGHQGRTIIFCETKKEAQELSQNSAIKQDAQSLHGDIPQKQREITLKGFRNGSFGVLVATNVAARGLDIPEVDLVIQSSPPKDVESYIHRSGRTGRAGRTGVCICFYQHKEEYQLVQVEQKAGIKFKRIGVPSATEIIKASSKDAIRLLDSVPPTAISHFKQSAEKLIEEKGAVEALAAALAHISGATSVDQRSLINSNVGFVTMILQCSIEMPNISYAWKELKEQLGEEIDSKVKGMVFLKGKLGVCFDVPTASVTEIQEKWHDSRRWQLSVATEQPELEGPREGYGGFRGQREGSRGFRGQRDGNRRFRGQREGSRGPRGQRSGGGNKSNRSQNKGQKRSFSKAFGQ

SEQ ID NO: 560 - DNA, 2416 bp, Homo sapien
cgatttcattcctcgctccccacaggtccctctccccaaaatattcccatcttgtcctagcccatcccccagactatctcaaggaccagctgtccccacgcccccgacctccactaggcctgtgccacccgctgcctgcaggaagacgcccggtcccgggccgggttagccccatgggaacgcagcgcctgtgtggccgcgggactcaaggctggcctggctcaagtgaacagcacgtccaggaggcgacctcgtccgcgggtttgcattctggggtggacgagctgggggttcggtccgagcccggtgggaggctcccggagcgcagcctgggcccagcccaccccgcgccggcggccatggcaggcaccctggacctggacaagggctgcacggtggaggagctgctccgcgggtgcatcgaagccttcgatgactccgggaaggtgcgggacccgcagctggtgcgcatgttcctcatgatgcacccctggtacatcccctcctctcagctggcggccaagctgctccacatctaccaacaatcccggaaggacaactccaattccctgcaggtgaaaacgtgccacctggtcaggtactggatctccgccttcccagcggagtttgacttgaacccggagttggctgagcagatcaaggagctgaaggctctgctagaccaagaagggaaccgacggcacagcagcctaatcgacatagacagcgtccctacctacaagtggaagcggcaggtgactcagcggaaccctgtgggacagaaaaagcgcaagatgtccctgttgtttgaccacctggagcccatggagctggcggagcatctcacctacttggagtatcgctccttctgcaagatcctgtttcaggactatcacagtttcgtgactcatggctgcactgtggacaaccccgtcctggagcggttcatctccctcttcaacagcgtctcacagtgggtgcagctcatgatcctcagcaaacccacagccccgcagcgggccctggtcatcacacactttgtccacgtggcggagaagctgctacagctgcagaacttcaacacgctgatggcagtggtcgggggcctgagccacagctccatctcccgcctcaaggagacccacagccacgttagccctgagaccatcaagctctgggagggtctcacggaactagtgacggcgacaggcaactatggcaactaccggcgtcggctggcagcctgtgtgggcttccgcttcccgatcctgggtgtgcacctcaaggacctggtggccctgcagctggcactgcctgactggctggacccagcccggacccggctcaacggggccaagatgaagcagctctttagcatcctggaggagctggccatggtgaccagcctgcggccaccagtacaggccaaccccgacctgctgagcctgctcacggtgtctctggatcagtatcagacggaggatgagctgtaccagctgtccctgcagcgggagccgcgctccaagtcctcgccaaccagccccacgagttgcaccccaccaccccggcccccggtactggaggagtggacctcggctgccaaacccaagctggatcaggccctcgtggtggagcacatcgagaagatggtggagtctgtgttccggaactttgacgtcgatggggatggccacatctcacaggaagaattccagatcatccgtgggaacttcccttacctcagcgcctttggggacctcgaccagaaccaggatggctgcatcagcagggaggagatggtttcctatttcctgcgctccagctctgtgttgggggggcgcatgggcttcgtacacaacttccaggagagcaactccttgcgccccgtcgcctgccgccactgcaaagccctgatcctgggcatctacaagcagggcctcaaatgccgagcctgtggagtgaactgccacaagcagtgcaaggatcgcctgtcagttgagtgtcggcgcagggcccagagtgtgagcctggaggggtctgcaccctcaccctcacccatgcacagccaccatcaccgcgccttcagcttctctctgccccgccctggcaggcgaggctccaggcctccagagatccgtgaggaggaggtacagacggtggaggatggggtgtttgacatccacttgtaatagatgctgtggttggatcaaggactcattcctgccttggagaaaatacttcaaccagagcagggagcctgggggtgtcggggcaggaggctggggatgggggtgggatatgagggtggcatgcagctgagggcagggccagggctggtgtccctaaggttgtacagactcttgtgaatatttgtattttccagatggaataaaaaggcccgtgtaattaaccttca

SEQ ID NO: 561 - protein, 671 aa, Homo sapien
MGTQRLCGRGTQGWPGSSEQHVQEATSSAGLHSGVDELGVRSEPGGRLPERSLGPAHPAPAAMAGTLDLDKGCTVEELLRGCIEAFDDSGKVRDPQLVRMFLMMHPWYIPSSQLAAKLLHIYQQSRKDNSNSLQVKTCHLVRYWISAFPAEFDLNPELAEQIKELKALLDQEGNRRHSSLIDIDSVPTYKWKRQVTQRNPVGQKKRKMSLLFDHLEPMELAEHLTYLEYRSFCKILFQDYHSFVTHGCTVDNPVLERFISLFNSVSQWVQLMILSKPTAPQRALVITHFVHVAEKLLQLQNFNTLMAVVGGLSHSSISRLKETHSHVSPETIKLWEGLTELVTATGNYGNYRRRLAACVGFRFPILGVHLKDLVALQLALPDWLDPARTRLNGAKMKQLFSILEELAMVTSLRPPVQANPDLLSLLTVSLDQYQTEDELYQLSLQREPRSKSSPTSPTSCTPPPRPPVLEEWTSAAKPKLDQALVVEHIEKMVESVFRNFDVDGDGHISQEEFQIIRGNFPYLSAFGDLDQNQDGCISREEMVSYFLRSSSVLGGRMGFVHNFQESNSLRPVACRHCKALILGIYKQGLKCRACGVNCHKQCKDRLSVECRRRAQSVSLEGSAPSPSPMHSHHHRAFSFSLPRPGRRGSRPPEIREEEVQTVEDGVFDIHL

SEQ ID NO: 562 - DNA, 2230 bp, Homo sapien
gcctgtcctgacacaatgtggctgggtccagacatgaagaggtgctaccgagcacctcaatctacctcaactacgacgttagcttctaccatgacgaggacagtacctgccaccacaagagcccccgggaccaccgtccacagatccacctaccagaaccacagcacagagacaccaagcctgacagctgcagtcccaagctcagttagtgtccccagggctcccagcatcagcccgtctaccctaagccctgcaaccagcaaccactcccagcactatgcaaatgaagacagtaagatgggctcaacagtcactgccgctgttatcgggatcatcgtgcccatagtggtgatagccctcctgtgcatgagtggatacctgatctggagaaactggaagcggaagaacaccaaaagcatgaattttgacaacccagtctacaggaaaacaacagaagaagaagacgaagatgagctccatatagggagaactgctcagattggccatgtctatcctgcagcaatcagcagctttgatcgcccactgtgggcagagccctgtcttggggagaccagagaaccggaagacccagcccctgccctcaaggagctttttgtcttgccgggggaaccaaggtcacagctgcaccaactcccgaagaaccctctttccgagctgcctgtcgtcaaatccaagcgagtggcattaagccttgaagatgatggactaccctgaggatgggatcacccccttcgtgcctcatggaattcagtcccatgcactacactctggatggtgtatgactggatgaatgggtttctatatatgggtctgtgtgagtgtatgtgtgtgtgtgattttttttttaaatttatgttgcggaaaggtaaccacaaagttatgatgaactgcaaacatccaaaggatgtgagagtttttctatgtataatgttttatacactttttaactggttgcactacccatgaggaattcgtggaatggctactgctgactaacatgatgcacataaccaaatgggggccaatggcacagtaccttactcatcatttaaaaactatatttacagaagatgtttggttgctgggggggctttttttaggttttggggcatttgttttttgtaaataagatgattatgctttgtggctatccatcaacataagtaaaaaaaaaaaaaaaacacttcaactccctcccccatttagattatttattaacatattttaaaaatcagatgagttctataaataatttagagaagtgagagtatttatttttggcatgtttggcccaccacacagactctgtgtgtgtatgtgtgtgtttatatgtgtatgtgtgtgacagaaaaatctgtagagaagaggcacatctatggctactgttcaaatacataaagataaatttattttcacacagtccacaaggggtatatcttgtagttttcagaaaagcctttggaaatctggatcagaaaatagataccatggtttgtgcaattatgtagtaaaaaaggcaaatcttttcacctctggctattcctgagaccccaggaagtcaggaaaagcctttcagctcacccatggctgctgtgactcctaccagggctttcttggctttggcgaaggtcagtgtacagacattccatggtaccagagtgctcagaaactcaagataggatatgcctcaccctcagctactccttgttttaaagttcagctctttgagtaacttcttcaatttctttcaggacacttgggttgaattcagtaagtttcctctgaagcaccctgaagggtgccatccttacagagctaagtggagacgtttccagatcagcccaagtttactatagagactggcccaggcactgaatgtctaggacatgctgtggatgaagataaagatggtggaataggttttatcacatctcttatttctcttttccccttactctctaccatttcctttatgtggggaaacattttaaggtaataaataggttacttaccatcatatgttcatatagatgaaactaatttttggcttaagtcagaacaactggccaaaattgaagtcatatttgaggggggaaatggcatacgcaatattatattatattggatatttatgttcacacaggaatttggtttactgctttgtaaataaaaggaaaaactccgggtaaaaaaaaaaaaaaaaaaaaaa

SEQ ID NO: 563 - DNA, 2354 bp, Homo sapien
gggaggaccccaatctaggcccaagagggaaaggccacgtgcctgtatgagcgtatgagcatgtgcatgcgcgtgtgtgcacagggtggtgcacctggcaggggtccttgagtgaggcatgccccattctgtagcagggaacctggaatgggctgtgtgttctgcaagaaattggagccggtggccacggccaaggaggatgctggcctggaaggggacttcagaagctacggggcagcagaccactatgggcctgaccccactaaggcccggcctgcatcctcatttgcccacatccccaactacagcaacttctcctctcaggccatcaaccctggcttccttgatagtggcaccatcaggggtgtgtcagggattggggtgaccctgttcattgccctgtatgactatgaggctcgaactgaggatgacctcaccttcaccaagggcgagaagttccacatcctgaacaatactgaaggtgactggtgggaggctcggtctctcagctccggaaaaactggctgcattcccagcaactacgtggcccctgttgactcaatccaagctgaagagtggtactttggaaagattgggagaaaggatgcagagaggcagctgctttcaccaggcaacccccagggggcctttctcattcgggaaagcgagaccaccaaaggtgcctactccctgtccatccgggactgggatcagaccagaggcgatcatgtgaagcattacaagatccgcaaactggacatgggcggctactacatcaccacacgggttcagttcaactcggtgcaggagctggtgcagcactacatggaggtgaatgacgggctgtgcaacctgctcatcgcgccctgcaccatcatgaagccgcagacgctgggcctggccaaggacgcctgggagatcagccgcagctccatcacgctggagcgccggctgggcaccggctgcttcggggatgtgtggctgggcacgtggaacggcagcactaaggtggcggtgaagacgctgaagccgggcaccatgtccccgaaggccttcctggaggaggcgcaggtcatgaagctgctgcggcacgacaagctggtgcagctgtacgccgtggtgtcggaggagcccatctacatcgtgaccgagttcatgtgtcacggcagcttgctggattttctcaagaacccagagggccaggatttgaggctgccccaattggtggacatggcagcccaggtagctgagggcatggcctacatggaacgcatgaactacattcaccgcgacctgagggcagccaacatcctggttggggagcggctggcgtgcaagatcgcagactttggcttggcgcgtctcatcaaggacgatgagtacaacccctgccaaggttccaagttccccatcaagtggacagccccagaagctgccctctttggcagattcaccatcaagtcagacgtgtggtcctttgggatcctgctcactgagctcatcaccaagggccgaatcccctacccaggcatgaataaacgggaagtgttggaacaggtggagcagggctaccacatgccgtgccctccaggctgcccagcatccctgtacgaggccatggaacagacctggcgtctggacccggaggagaggcctaccttcgagtacctgcagtccttcctggaggactacttcacctccgctgaaccacagtaccagcccggggatcagacatagcctgtccgggcatcaaccctctctggcggtggccaccagtccttgccaatccccagagctgttcttccaaagcccccaggctggcttagaaccccatagagtcctagcatcaccgaggacgtggctgctctgacaccacctagggcaacctacttgttttacagatggggcaaaaggaggcccagagctgatctctcatccgctctggccccaagcactatttcttccttttccacttaggcccctacatgcctgtagccctttctcactccatccccacccaaaagtgctcagaccttgtctagttatttataaactgtatgtacctccctcacttctctcctatcactgctttcctactctccttttatctcactctagtccaggtgccaagaatttcccttctaccctctattctcttgtgtctgtaagttacaaagtcaggaaaagtcttggctggacccctttcctgctgggtggatgcagtggtccaggactggggtctgggcccaggtttgagggagaagtttgcagagcacttcccacctctctgaatagtgtgtatgtgttgatttattgattctgtaaataagtaaaatgacaatatgaatcctcca

SEQ ID NO: 564 - protein, 529 aa, Homo sapien
MGCVFCKKLEPVATAKEDAGLEGDFRSYGAADHYGPDPTKARPASSFAHIPNYSNFSSQAINPGFLDSGTIRGVSGIGVTLFIALYDYEARTEDDLTFTKGEKFHILNNTEGDWWEARSLSSGKTGCIPSNYVAPVDSIQAEEWYFGKIGRKDAERQLLSPGNPQGAFLIRESETTKGAYSLSIRDWDQTRGDHVKHYKIRKLDMGGYYITTRVQFNSVQELVQHYMEVNDGLCNLLIAPCTIMKPQTLGLAKDAWEISRSSITLERRLGTGCFGDVWLGTWNGSTKVAVKTLKPGTMSPKAFLEEAQVMKLLRHDKLVQLYAVVSEEPIYIVTEFMCHGSLLDFLKNPEGQDLRLPQLVDMAAQVAEGMAYMERMNYIHRDLRAANILVGERLACKIADFGLARLIKDDEYNPCQGSKFPIKWTAPEAALFGRFTIKSDVWSFGILLTELITKGRIPYPGMNKREVLEQVEQGYHMPCPPGCPASLYEAMEQTWRLDPEERPTFEYLQSFLEDYFTSAEPQYQPGDQT

SEQ ID NO: 565 - DNA, 9886 bp, Homo sapien
gcgagaggagtcgggatctgcgctgcagccaccgccgcggttgatactactttgaccttccgagtgcagtgaggcatacatcacaatttggaattatgcattggtttatcaatttacttgtttattgtcaccctgctgcccagatatgacttcatgaggacagtgatgtgtgttctgaaattgtgaaccatgagtctagtacttaatgatctgcttatctgctgccgtcaactagaacatgatagagctacagaacgaaagaaagaagttgagaaatttaagcgcctgattcgagatcctgaaacaattaaacatctagatcggcattcagattccaaacaaggaaaatatttgaattgggatgctgtttttagatttttacagaaatatattcagaaagaaacagaatgtctgagaatagcaaaaccaaatgtatcagcctcaacacaagcctccaggcagaaaaagatgcaggaaatcagtagtttggtcaaatacttcatcaaatgtgcaaacagaagagcacctaggctaaaatgtcaagaactcttaaattatatcatggatacagtgaaagattcatctaatggtgctatttacggagctgattgtagcaacatactactcaaagacattctttctgtgagaaaatactggtgtgaaatatctcagcaacagtggttagaattgttctctgtgtacttcaggctctatctgaaaccttcacaagatgttcatagagttttagtggctagaataattcatgctgttaccaaaggatgctgttctcagactgacggattaaattccaaatttttggactttttttccaaggctattcagtgtgcgagacaagaaaagagctcttcaggtctaaatcatatcttagcagctcttactatcttcctcaagactttggctgtcaactttcgaattcgagtgtgtgaattaggagatgaaattcttcccactttgctttatatttggactcaacataggcttaatgattctttaaaagaagtcattattgaattatttcaactgcaaatttatatccatcatccgaaaggagccaaaacccaagaaaaaggtgcttatgaatcaacaaaatggagaagtattttatacaacttatatgatctgctagtgaatgagataagtcatataggaagtagaggaaagtattcttcaggatttcgtaatattgccgtcaaagaaaatttgattgaattgatggcagatatctgtcaccaggtttttaatgaagataccagatccttggagatttctcaatcttacactactacacaaagagaatctagtgattacagtgtcccttgcaaaaggaagaaaatagaactaggctgggaagtaataaaagatcaccttcagaagtcacagaatgattttgatcttgtgccttggctacagattgcaacccaattaatatcaaagtatcctgcaagtttacctaactgtgagctgtctccattactgatgatactatctcagcttctaccccaacagcgacatggggaacgtacaccatatgtgttacgatgccttacggaagttgcattgtgtcaagacaagaggtcaaacctagaaagctcacaaaagtcagatttattaaaactctggaataaaatttggtgtattacctttcgtggtataagttctgagcaaatacaagctgaaaactttggcttacttggagccataattcagggtagtttagttgaggttgacagagaattctggaagttatttactgggtcagcctgcagaccttcatgtcctgcagtatgctgtttgactttggcactgaccaccagtatagttccaggagcggtaaaaatgggaatagagcaaaatatgtgtgaagtaaatagaagcttttctttaaaggaatcaataatgaaatggctcttattctatcagttagagggtgacttagaaaatagcacagaagtgcctccaattcttcacagtaattttcctcatcttgtactggagaaaattcttgtgagtctcactatgaaaaactgtaaagctgcaatgaattttttccaaagcgtgccagaatgtgaacaccaccaaaaagataaagaagaactttcattctcagaagtagaagaactatttcttcagacaacttttgacaagatggactttttaaccattgtgagagaatgtggtatagaaaagcaccagtccagtattggcttctctgtccaccagaatctcaaggaatcactggatcgctgtcttctgggattatcagaacagcttctgaataattactcatctgagattacaaattcagaaactcttgtccggtgttcacgtcttttggtgggtgtccttggctgctactgttacatgggtgtaatagctgaagaggaagcatataagtcagaattattccagaaagccaactctctaatgcaatgtgcaggagaaagtatcactctgtttaaaaataagacaaatgaggaattcagaattggttccttgagaaatatgatgcagctatgtacacgttgcttgagcaactgtaccaagaagagtccaaataagattgcatctggctttttcctgcgattgttaacatcaaagctaatgaatgacattgcagatatttgtaaaagtttagcatccttcatcaaaaagccatttgaccgtggagaagtagaatcaatggaagatgatactaatggaaatctaatggaggtggaggatcagtcatccatgaatctatttaacgattaccctgatagtagtgttagtgatgcaaacgaacctggagagagccaaagtaccataggtgccattaatcctttagctgaagaatatctgtcaaagcaagatctacttttcttagacatgctcaagttcttgtgtttgtgtgtaactactgctcagaccaatactgtgtcctttagggcagctgatattcggaggaaattgttaatgttaattgattctagcacgctagaacctaccaaatccctccacctgcatatgtatctaatgcttttaaaggagcttcctggagaagagtaccccttgccaatggaagatgttcttgaacttctgaaaccactatccaatgtgtgttctttgtatcgtcgtgaccaagatgtttgtaaaactattttaaaccatgtccttcatgtagtgaaaaacctaggtcaaagcaatatggactctgagaacacaagggatgctcaaggacagtttcttacagtaattggagcattttggcatctaacaaaggagaggaaatatatattctctgtaagaatggccctagtaaattgccttaaaactttgcttgaggctgatccttattcaaaatgggccattcttaatgtaatgggaaaagactttcctgtaaatgaagtatttacacaatttcttgctgacaatcatcaccaagttcgcatgttggctgcagagtcaatcaatagattgttccaggacacgaagggagattcttccaggttactgaaagcacttcctttgaagcttcagcaaacagcttttgaaaatgcatacttgaaagctcaggaaggaatgagagaaatgtcccatagtgctgagaaccctgaaactttggatgaaatttataatagaaaatctgttttactgacgttgatagctgtggttttatcctgtagccctatctgcgaaaaacaggctttgtttgccctgtgtaaatctgtgaaagagaatggattagaacctcaccttgtgaaaaaggttttagagaaagtttctgaaacttttggatatagacgtttagaagactttatggcatctcatttagattatctggttttggaatggctaaatcttcaagatactgaatacaacttatcttcttttccttttattttattaaactacacaaatattgaggatttctatagatcttgttataaggttttgattccacatctggtgattagaagtcattttgatgaggtgaagtccattgctaatcagattcaagaggactggaaaagtcttctaacagactgctttccaaagattcttgtaaatattcttccttattttgcctatgagggtaccagagacagtgggatggcacagcaaagagagactgctaccaaggtctatgatatgcttaaaagtgaaaacttattgggaaaacagattgatcacttattcattagtaatttaccagagattgtggtggagttattgatgacgttacatgagccagcaaattctagtgccagtcagagcactgacctctgtgacttttcaggggatttggatcctgctcctaatccacctcattttccatcgcatgtgattaaagcaacatttgcctatatcagcaattgtcataaaaccaagttaaaaagcattttagaaattctttccaaaagccctgattcctatcagaaaattcttcttgccatatgtgagcaagcagctgaaacaaataatgtttataagaagcacagaattcttaaaatatatcacctgtttgttagtttattactgaaagatataaaaagtggcttaggaggagcttgggcctttgttcttcgagacgttatttatactttgattcactatatcaaccaaaggccttcttgtatcatggatgtgtcattacgtagcttctccctttgttgtgacttattaagtcaggtttgccagacagccgtgacttactgtaaggatgctctagaaaaccatcttcatgttattgttggtacacttataccccttgtgtatgagcaggtggaggttcagaaacaggtattggacttgttgaaatacttagtgatagataacaaggataatgaaaacctctatatcacgattaagcttttagatccttttcctgaccatgttgtttttaaggatttgcgtattactcagcaaaaaatcaaatacagtagaggacccttttcactcttggaggaaattaaccattttctctcagtaagtgtttatgatgcacttccattgacaagacttgaaggactaaaggatcttcgaagacaactggaactacataaagatcagatggtggacattatgagagcttctcaggataatccgcaagatgggattatggtgaaactagttgtcaatttgttgcagttatccaagatggcaataaaccacactggtgaaaaagaagttctagaggctgttggaagctgcttgggagaagtgggtcctatagatttctctaccatagctatacaacatagtaaagatgcatcttataccaaggcccttaagttatttgaagataaagaacttcagtggaccttcataatgctgacctacctgaataacacactggtagaagattgtgtcaaagttcgatcagcagctgttacctgtttgaaaaacattttagccacaaagactggacatagtttctgggagatttataagatgacaacagatccaatgctggcctatctacagccttttagaacatcaagaaaaaagtttttagaagtacccagatttgacaaagaaaacccttttgaaggcctggatgatataaatctgtggattcctctaagtgaaaatcatgacatttggataaagacactgacttgtgcttttttggacagtggaggcacaaaatgtgaaattcttcaattattaaagccaatgtgtgaagtgaaaactgacttttgtcagactgtacttccatacttgattcatgatattttactccaagatacaaatgaatcatggagaaatctgctttctacacatgttcagggatttttcaccagctgtcttcgacacttctcgcaaacgagccgatccacaacccctgcaaacttggattcagagtcagagcactttttccgatgctgtttggataaaaaatcacaaagaacaatgcttgctgttgtggactacatgagaagacaaaagagaccttcttcaggaacaatttttaatgatgctttctggctggatttaaattatctagaagttgccaaggtagctcagtcttgtgctgctcactttacagctttactctatgcagaaatctatgcagataagaaaagtatggatgatcaagagaaaagaagtcttgcatttgaagaaggaagccagagtacaactatttctagcttgagtgaaaaaagtaaagaagaaactggaataagtttacaggatcttctcttagaaatctacagaagtataggggagccagatagtttgtatggctgtggtggagggaagatgttacaacccattactagactacgaacatatgaacacgaagcaatgtggggcaaagccctagtaacatatgacctcgaaacagcaatcccctcatcaacacgccaggcaggaatcattcaggccttgcagaatttgggactctgccatattctttccgtctatttaaaaggattggattatgaaaataaagactggtgtcctgaactagaagaacttcattaccaagcagcatggaggaatatgcagtgggaccattgcacttccgtcagcaaagaagtagaaggaaccagttaccatgaatcattgtacaatgctctacaatctctaagagacagagaattctctacattttatgaaagtctcaaatatgccagagtaaaagaagtggaagagatgtgtaagcgcagccttgagtctgtgtattcgctctatcccacacttagcaggttgcaggccattggagagctggaaagcattggggagcttttctcaagatcagtcacacatagacaactctctgaagtatatattaagtggcagaaacactcccagcttctcaaggacagtgattttagttttcaggagcctatcatggctctacgcacagtcattttggagatcctgatggaaaaggaaatggacaactcacaaagagaatgtattaaggacattctcaccaaacaccttgtagaactctctatactggccagaactttcaagaacactcagctccctgaaagggcaatatttcaaattaaacagtacaattcagttagctgtggagtctctgagtggcagctggaagaagcacaagtattctgggcaaaaaaggagcagagtcttgccctgagtattctcaagcaaatgatcaagaagttggatgccagctgtgcagcgaacaatcccagcctaaaacttacatacacagaatgtctgagggtttgtggcaactggttagcagaaacgtgcttagaaaatcctgcggtcatcatgcagacctatctagaaaaggcagtagaagttgctggaaattatgatggagaaagtagtgatgagctaagaaatggaaaaatgaaggcatttctctcattagcccggttttcagatactcaataccaaagaattgaaaactacatgaaatcatcggaatttgaaaacaagcaagctctcctgaaaagagccaaagaggaagtaggtctccttagggaacataaaattcagacaaacagatacacagtaaaggttcagcgagagctggagttggatgaattagccctgcgtgcactgaaagaggatcgtaaacgcttcttatgtaaagcagttgaaaattatatcaactgcttattaagtggagaagaacatgatatgtgggtattccggctttgttccctctggcttgaaaattctggagtttctgaagtcaatggcatgatgaagagagacggaatgaagattccaacatataaatttttgcctcttatgtaccaattggctgctagaatggggaccaagatgatgggaggcctaggatttcatgaagtcctcaataatctaatctctagaatttcaatggatcacccccatcacactttgtttattatactggccttagcaaatgcaaacagagatgaatttctgactaaaccagaggtagccagaagaagcagaataactaaaaatgtgcctaaacaaagctctcagcttgatgaggatcgaacagaggctgcaaatagaataatatgtactatcagaagtaggagacctcagatggtcagaagtgttgaggcactttgtgatgcttatattatattagcaaacttagatgccactcagtggaagactcagagaaaaggcataaatattccagcagaccagccaattactaaacttaagaatttagaagatgttgttgtccctactatggaaattaaggtggaccacacaggagaatatggaaatctggtgactatacagtcatttaaagcagaatttcgcttagcaggaggtgtaaatttaccaaaaataatagattgtgtaggttccgatggcaaggagaggagacagcttgttaagggccgtgatgacctgagacaagatgctgtcatgcaacaggtcttccagatgtgtaatacattactgcagagaaacacggaaactaggaagaggaaattaactatctgtacttataaggtggttcccctctctcagcgaagtggtgttcttgaatggtgcacaggaactgtccccattggtgaatttcttgttaacaatgaagatggtgctcataaaagatacaggccaaatgatttcagtgcctttcagtgccaaaagaaaatgatggaggtgcaaaaaaagtcttttgaagagaaatatgaagtcttcatggatgtttgccaaaattttcaaccagttttccgttacttctgcatggaaaaattcttggatccagctatttggtttgagaagcgattggcttatacgcgcagtgtagctacttcttctattgttggttacatacttggacttggtgatagacatgtacagaatatcttgataaatgagcagtcagcagaacttgtacatatagatctaggtgttgcttttgaacagggcaaaatccttcctactcctgagacagttccttttagactcaccagagatattgtggatggcatgggcattacgggtgttgaaggtgtcttcagaagatgctgtgagaaaaccatggaagtgatgagaaactctcaggaaactctgttaaccattgtagaggtccttctatatgatccactctttgactggaccatgaatcctttgaaagctttgtatttacagcagaggccggaagatgaaactgagcttcaccctactctgaatgcagatgaccaagaatgcaaacgaaatctcagtgatattgaccagagtttcaacaaagtagctgaacgtgtcttaatgagactacaagagaaactgaaaggagtggaagaaggcactgtgctcagtgttggtggacaagtgaatttgctcatacagcaggccatagaccccaaaaatctcagccgacttttcccaggatggaaagcttgggtgtgatcttcagtatatgaattaccctttcattcagcctttagaaattatattttagcctttatttttaacctgccaacatactttaagtagggattaatatttaagtgaactattgtgggtttttttgaatgttggttttaatacttgatttaatcaccactcaaaaatgttttgatggtcttaaggaacatctctgctttcactctttagaaataatggtcattcgggctgggcgcagcggctcacgcctgtaatcccagcactttgggaggccgaggtgagcggatcacaaggtcaggagttcgagaccagcctggccaagagaccagcctggccagtatggtgaaaccctgtctctactaaaaatacaaaaattagccgagcatggtggcgggcacctgtagtcccagctactcgagaggctgaggcaggagaatctcttgaacctgggaggtgaaggttgctgtgggccaaaatcatgccattgcactccagcctgggtgacaagagcgaaactccatctcaaaaa

SEQ ID NO: 566 - protein, 1708 aa, Homo sapien
MTLHEPANSSASQSTDLCDFSGDLDPAPNPPHFPSHVIKATFAYISNCHKTKLKSILEILSKSPDSYQKILLAICEQAAETNNVYKKHRILKIYHLFVSLLLKDIKSGLGGAWAFVLRDVIYTLIHYINQRPSCIMDVSLRSFSLCCDLLSQVCQTAVTYCKDALENHLHVIVGTLIPLVYEQVEVQKQVLDLLKYLVIDNKDNENLYITIKLLDPFPDHVVFKDLRITQQKIKYSRGPFSLLEEINHFLSVSVYDALPLTRLEGLKDLRRQLELHKDQMVDIMRASQDNPQDGIMVKLVVNLLQLSKMAINHTGEKEVLEAVGSCLGEVGPIDFSTIAIQHSKDASYTKALKLFEDKELQWTFIMLTYLNNTLVEDCVKVRSAAVTCLKNILATKTGHSFWEIYKMTTDPMLAYLQPFRTSRKKFLEVPRFDKENPFEGLDDINLWIPLSENHDIWIKTLTCAFLDSGGTKCEILQLLKPMCEVKTDFCQTVLPYLIHDILLQDTNESWRNLLSTHVQGFFTSCLRHFSQTSRSTTPANLDSESEHFFRCCLDKKSQRTMLAVVDYMRRQKRPSSGTIFNDAFWLDLNYLEVAKVAQSCAAHFTALLYAEIYADKKSMDDQEKRSLAFEEGSQSTTISSLSEKSKEETGISLQDLLLEIYRSIGEPDSLYGCGGGKMLQPITRLRTYEHEAMWGKALVTYDLETAIPSSTRQAGIIQALQNLGLCHILSVYLKGLDYENKDWCPELEELHYQAAWRNMQWDHCTSVSKEVEGTSYHESLYNALQSLRDREFSTFYESLKYARVKEVEEMCKRSLESVYSLYPTLSRLQAIGELESIGELFSRSVTHRQLSEVYIKWQKHSQLLKDSDFSFQEPIMALRTVILEILMEKEMDNSQRECIKDILTKHLVELSILARTFKNTQLPERAIFQIKQYNSVSCGVSEWQLEEAQVFWAKKEQSLALSILKQMIKKLDASCAANNPSLKLTYTECLRVCGNWLAETCLENPAVIMQTYLEKAVEVAGNYDGESSDELRNGKMKAFLSLARFSDTQYQRIENYMKSSEFENKQALLKRAKEEVGLLREHKIQTNRYTVKVQRELELDELALRALKEDRKRFLCKAVENYINCLLSGEEHDMWVFRLCSLWLENSGVSEVNGMMKRDGMKIPTYKFLPLMYQLAARMGTKMMGGLGFHEVLNNLISRISMDHPHHTLFIILALANANRDEFLTKPEVARRSRITKNVPKQSSQLDEDRTEAANRIICTIRSRRPQMVRSVEALCDAYIILANLDATQWKTQRKGINIPADQPITKLKNLEDVVVPTMEIKVDHTGEYGNLVTIQSFKAEFRLAGGVNLPKIIDCVGSDGKERRQLVKGRDDLRQDAVMQQVFQMCNTLLQRNTETRKRKLTICTYKVVPLSQRSGVLEWCTGTVPIGEFLVNNEDGAHKRYRPNDFSAFQCQKKMMEVQKKSFEEKYEVFMDVCQNFQPVFRYFCMEKFLDPAIWFEKRLAYTRSVATSSIVGYILGLGDRHVQNILINEQSAELVHIDLGVAFEQGKILPTPETVPFRLTRDIVDGMGITGVEGVFRRCCEKTMEVMRNSQETLLTIVEVLLYDPLFDWTMNPLKALYLQQRPEDETELHPTLNADDQECKRNLSDIDQSFNKVAERVLMRLQEKLKGVEEGTVLSVGGQVNLLIQQAIDPKNLSRLFPGWKAWV

SEQ ID NO: 567 - DNA, 1410 bp, Homo sapien
cgcgcctcgggcggtacccagccagtccccagcgccgcgctaccgcgctgaccggccctccagacgcctcccggtacccgggaccccagcccggccgctcgcccgcagcccgccggccgcacacgtccccggagccgggcctagggcgggcggcagcggcggctcggcgcagtcaggctgggctctgtagcgtccccatggccgcggccggctggcgggacggctccggccaggagaagtaccggctcgtggtggtcggcgggggcggcgtgggcaagtcggcgctcaccatccagttcatccagtcctattttgtaacggattatgatccaaccattgaagattcttacacaaagcagtgtgtgatagatgacagagcagcccggctagatattttggatacagcaggacaagaagagtttggagccatgagagaacagtatatgaggactggcgaaggcttcctgttggtcttttcagtcacagatagaggcagttttgaagaaatctataagtttcaaagacagattctcagagtaaaggatcgtgatgagttcccaatgattttaattggtaataaagcagatctggatcatcaaagacaggtaacacaggaagaaggacaacagttagcacggcagcttaaggtaacatacatggaggcatcagcaaagattaggatgaatgtagatcaagctttccatgaacttgtccgggttatcaggaaatttcaagagcaggaatgtcctccttcaccagaaccaacacggaaagaaaaagacaagaaaggctgccattgtgtcattttctagaatcccttcagttttagctaccaacggccaggaaaagccctcatcttctctttctctcctcagtttacatcttgttggtacctttctagccttagacaaatgatcaccatgttagccttagaccaagaagctggctagtcctttctgtgaagctaatacaatggtcatttccagacaaatttaaaggaaacactaaggctgcttcaaagattatctgattcctttaaaatatatgtctatatacacagacatgctctttttttaagtgcttacattttaatagagatgaatcagttttggaatctaagctgtttgccaagctgaagctacaggttgtgaaataatttttaacttttggaatcatactgcctactgttactctaaatagaaatatagggttttttttaatgtgaatttttgcctatctttaaacatttcaatgtcagcctttgttaaccttaaatacactgaattgaatctacaaaagtgaaccatctcagacctttactgatactacaacttttgttttctgatggccaaaataccaaatgcctgttgtatttatggattaaaaactgcttataaaaaaaaaaaaaaa

SEQ ID NO: 568 - protein, 204 aa, Homo sapien
MAAAGWRDGSGQEKYRLVVVGGGGVGKSALTIQFIQSYFVTDYDPTIEDSYTKQCVIDDRAARLDILDTAGQEEFGAMREQYMRTGEGFLLVFSVTDRGSFEEIYKFQRQILRVKDRDEFPMILIGNKADLDHQRQVTQEEGQQLARQLKVTYMEASAKIRMNVDQAFHELVRVIRKFQEQECPPSPEPTRKEKDKKGCHCVIF

SEQ ID NO: 569 - DNA, 1660 bp, Homo sapien
aaaatgtgcttcttacaggaatataaatagtttctggaaaggacactgacaacttcaaagcaaaatgaagttctttctgttgcttttcaccattgggttctgctgggctcagtattccccaaatacacaacaaggacggacatctattgttcatctgtttgaatggcgatgggttgatattgctcttgaatgtgagcgatatttagctccgaagggatttggaggggttcaggtctctccaccaaatgaaaatgttgcaatttacaaccctttcagaccttggtgggaaagataccaaccagttagctataaattatgcacaagatctggaaatgaagatgaatttagaaacatggtgactagatgtaacaatgttggggttcgtatttatgtggatgctgtaattaatcatatgtgtggtaacgctgtgagtgcaggaacaagcagtacctgtggaagttacttcaaccctggaagtagggactttccagcagtcccatattctggatgggatttcaatgatggtaaatgtaaaactggaagtggagatatcgagaactacaatgatgctactcaggtcagagattgtcgtctgactggtcttcttgatcttgcactggagaaggattacgtgcgttctaagattgccgaatatatgaaccatctcattgacattggtgttgcagggttcagacttgatgcttccaagcacatgtggcctggagacataaaggcaattttggacaaactgcataatctaaacagtaactggttccctgcaggaagtaaacctttcatttaccaggaggtaattgatctgggtggtgagccaattaaaagcagtgactactttggtaatggccgggtgacagaattcaagtatggtgcaaaactcggcacagttattcgcaagtggaatggagagaagatgtcttacttaaagaactggggagaaggttggggtttcgtaccttctgacagagcgcttgtctttgtggataaccatgacaatcaacgaggacatggggctggaggagcctctattcttaccttctgggatgctaggctgtacaaaatggcagttggatttatgcttgctcatccttacggatttacacgagtaatgtcaagctaccgttggccaagacagtttcaaaatggaaacgatgttaatgattgggttgggccaccaaataataatggagtaattaaagaagttactattaatccagacactacttgtggcaatgactgggtctgtgaacatcgatggcgccaaataaggaacatggttattttccgcaatgtagtggatggccagccttttacaaattggtatgataatgggagcaaccaagtggcttttgggagaggaaacagaggattcattgttttcaacaatgatgactggtcattttctttaactttgcaaactggtcttcctgctggcacatactgtgatgtcatttctggagataaaattaatggcaattgcacaggcattaaaatttacgtttctgatgatggcaaagctcatttttctattagtaactctgctgaagatccatttattgcaattcatgctgaatctaaattgtaaaatttaaaattaaatgcatgtcctcaaaacaaaaaaaaaaaaaaaaaaaaaaaaaaaaaa

SEQ ID NO: 570 - protein, 511 aa, Homo sapien
MKFFLLLFTIGFCWAQYSPNTQQGRTSIVHLFEWRWVDIALECERYLAPKGFGGVQVSPPNENVAIYNPFRPWWERYQPVSYKLCTRSGNEDEFRNMVTRCNNVGVRIYVDAVINHMCGNAVSAGTSSTCGSYFNPGSRDFPAVPYSGWDFNDGKCKTGSGDIENYNDATQVRDCRLTGLLDLALEKDYVRSKIAEYMNHLIDIGVAGFRLDASKHMWPGDIKAILDKLHNLNSNWFPAGSKPFIYQEVIDLGGEPIKSSDYFGNGRVTEFKYGAKLGTVIRKWNGEKMSYLKNWGEGWGFVPSDRALVFVDNHDNQRGHGAGGASILTFWDARLYKMAVGFMLAHPYGFTRVMSSYRWPRQFQNGNDVNDWVGPPNNNGVIKEVTINPDTTCGNDWVCEHRWRQIRNMVIFRNVVDGQPFTNWYDNGSNQVAFGRGNRGFIVFNNDDWSFSLTLQTGLPAGTYCDVISGDKINGNCTGIKIYVSDDGKAHFSISNSAEDPFIAIHAESKL

SEQ ID NO: 571 - DNA, 5018 bp, Homo sapien
tctagatgggggtcctgggccccagggtgtgcagccactgacttggggactgctggtggggtagggatgagggagggaggggcattgtgatgtacagggctgctctgtgagatcaagggtctcttaagggtgggagctggggcagggactacgagagcagccagatgggctgaaagtggaactcaaggggtttctggcacctacctacctgcttcccgctggggggtggggagttggcccagagtcttaagattggggcagggtggagaggtgggctcttcctgcttcccactcatcttatagctttctttccccagatccgaattcgagatccaaaccaaggaggaaaggatatcacagaggagatcatgtctggggcccgcactgcctccacacccacccctccccagacgggaggcagtctggagcctcaagctaatggggagacgccccaggttgctgtcattgtccggccagatgaccggtcacagggagcaatcattgctgaccggccagggctgcctggcccagagcatagcccttcagaatcccagccttcgtcgccttctccgaccccatcaccatccccagtcttggaaccggggtctgagcctaatctcgcagtcctctctattcctggggacactatgacaactatacaaatgtctgtagaagaatcaacccccatctcccgtgaaactggggagccatatcgcctctctccagaacccactcctctcgccgaacccatactggaagtagaagtgacacttagcaaaccggttccagaatctgagttttcttccagtcctctccaggctcccacccctttggcatctcacacagtggaaattcatgagcctaatggcatggtcccatctgaagatctggaaccagaggtggagtcaagcccagagcttgctcctcccccagcttgcccctccgaatcccctgtgcccattgctccaactgcccaacctgaggaactgctcaacggagccccctcgccaccagctgtggacttaagcccagtcagtgagccagaggagcaggccaaggaggtgacagcatcagtggcgccccccaccatcccctctgctactccagctacggctccttcagctacttccccagctcaggaggaggaaatggaagaagaagaagatgaggaagaaggagaagtaggggaagcaggggaaggtgagagtgagaagagaggagaggaactgctccccccagagagtacccctattccagccaacttgtctcagaatttggaggcagcagcagccactcaagtggcagtatctgtgccaaagaggagacggaaaattaaggagctaaataagaaggaggctgttggagaccttctggatgccttcaaggaggcgaacccggcagtaccagaggtggaaaatcagcctcctgcaggcagcaatccaggcccagagtctgagggcagtggtgtgcccccacgtcctgaggaagcagatgagacctgggactcaaaggaagacaaaattcacaatgctgagaacatccagcccggggaacagaagtatgaatataagtcagatcagtggaagcctccaaacctagaggagaaaaaacgttacgaccgtgagttcctgcttggttttcagttcatcttttgccagatgcagaagccagagggattgccacatatcagtgacgtggtgctggacaaggccaataaaacaccactgcggccactggatcccactagactacaaggcataaattgtggcccagacttcactccatcctttgccaaccttggccggacaacccttagcacccgtgggcccccaaggggtgggccaggtggggagctcgcccgtggcgcgcaggctggcctgggaccccggcgctctcagcagggaccccgaaaagaaccacgcaagatcattgccacagtgttaatgaccgaagatataaaactgaacaaagcagagaaagcctggaaacccagcagcaagcggacagcggctgataaggatcgaggggaagaagatgctgatggcagcaaaacccaggacctattccgcaggtggcgctccatcctgaataaactgacaccccagatgttccagcagctgatgaagcaagtgacgcagctggccatcgacaccgaggacgcctcaaaggggtcattgacctcatttttgagaaggccatttcagagcccaacttctctgtggcctatccaacatgtgccgctgcctcatggcgctgaaagtgcccactacggaaagccaacagtgactgtgaacttccgaaagctgttgttgaatcgatgtcagaaggagtttgagaaagacaaagatgatgatgaggtttttgagaagaagcaaaaagagatggatgaagctgctacggcagaggaacgagaacgcctgaaggaggagctggaagaggctcgggacatagcccggcgctgctctttagggaatatcaagtttattggagagttgttcaaactgaagatgttaacagaggcaataatgcatgactgtgtggtcaaactgcttaagaaccatgatgaagagtcccttgagtgcctttgtcgtctgctcaccaccattggcaaagacctggactttgaaaaagccaagccccgaatggatcagtatttcaaccagatggaaaaaatcattaaagaaaagaagacgtcatcccgcatccgctttatgctgcaggacgtgctggatctgcgagggagcaattgggtgccacgccgaggggatcagggtccaagaccattgaccagatccataaggaggctgagatggaagacatcgagagcacatcaaagtgcagcagctcatgcaagggcagtgacaagcgtcggggcggtcctccaggccctcccatcagccgtggacttccccttgtggatgatggtggctgacacagttcccatcagcaaaggtagccgccccattgacacctcacgactcaccaagatcaccaagcctggctccatcgattctaacaaccagctctttgcacctggagggcgactgagctggggcaagggcagcagcggagggtcaggagcccagccctcagacgcagcatcagaagctgctcgcccagctactagtactttgattcgcttctcagcccttcaacaagcggtacccacagaaagcacagataatagacgtgtggtgcagaggagtagcttgagccgagaacgaggcgagaaagctggagaccgaggagaccgcctagagcgagtgaacggggaggggaccgtggggaccggcttgatcgtgtcgcggacacctgctaccaagcggacgttcagcaaggaagtggaggagcggagtagagaacggccctcccagcctgaggggctgcgcaaggcagctagcctcacggaggatcgggaccgtgggcgggatgccgtgaagcgagaagctgccctacccccagtgagccccctgaaggcggctctctctgaggaggagttagagaagaaatccaaggctatcattgaggaatatctccatctcaatgacatgaaagaggcagtccagtgcgtgcaggagctggcctcaccctccttgctcttcatctttgtacggcatggtgtcgagtctacgctggagcgcagtgccattgctcgtgagcatatggggcagctgctgcaccagctgctctgtgctgggcatctgtctactgctcagtactaccaagggttgtatgaaatcttggaattggctgaggacatggaaattgacatcccccacgtgtggctctacctagcggaactggtaacacccattctgcaggaaggtggggtgcccatgggggagctgttcagggagattacaaagcctctgagaccgttgggcaaagctgcttccctgttgctggagatcctgggcctcctgtgcaaaagcatgggtcctaaaaaggtggggacgctgtggcgagaagccgggcttagctggaaggaatttctacctgaaggccaggacattggtgcattcgtcgctgaacagaaggtggagtataccctgggagaggagtcggaagcccctggccagagggcactcccctccgaggagctgaacaggcagctggagaagctgctgaaggagggcagcagtaaccagcgggtgttcgactggatagaggccaacctgagtgagcagatagtatccaacacgttagttcgagccctcatgacggctgtctgctattctgcaattatttttgagactcccctccgagtggacgttgcagtgctgaaaggcgacatagtgctgcagaaatacctgtgtgacgaagcagaaggagctacaggcgctctacgcctccaggcccttgtagtgaccttagaacagcctcccaacctgctgcggatgttctttgacgcactgtatgacgaggacgtggtgaaggaggatgccttctacagttgggagagtagcaaggaccccgctgagcagcagggcaagggtgtggcccttaaatctgtcacagccttcttcaagtggctccgtgaagtcagaggaggagtctgaccacaactgagggctggtggggccggggacctggagccccatggacacacagatggctccggctagccgcctggactgcaggggggcggcagcagcggcggtggcagtgggtgcctgtagtgtgatgtgtctgaactaataaagtggctgaagaggcaggatggcttggggctgcctgggcccccctccaggatgccgccaggtgtccctctcctcccctggggcacagagatatattatatataaagtcttgaaaattttgaaatttggtgtgtcttggggtggggaggggcaccaacgcctgcccctggggtccttttttttattttctgaaaatcactctcggactgccgtcctcgctgctgggcatatgccccagcccctgtaccacccctgctgttgcctgggcagggggaagggggggcacggtgcctgtaattattaaacatgaattcaatt

SEQ ID NO: 572 - protein, 1396 aa, Homo sapien
MSGARTASTPTPPQTGGSLEPQANGETPQVAVIVRPDDRSQGAIIADRPGLPGPEHSPSESQPSSPSPTPSPSPVLEPGSEPNLAVLSIPGDTMTTIQMSVEESTPISRETGEPYRLSPEPTPLAEPILEVEVTLSKPVPESEFSSSPLQAPTPLASHTVEIHEPNGMVPSEDLEPEVESSPELAPPPACPSESPVPIAPTAQPEELLNGAPSPPAVDLSPVSEPEEQAKEVTASVAPPTIPSATPATAPSATSPAQEEEMEEEEDEEEGEVGEAGEGESEKRGEELLPPESTPIPANLSQNLEAAAATQVAVSVPKRRRKIKELNKKEAVGDLLDAFKEANPAVPEVENQPPAGSNPGPESEGSGVPPRPEEADETWDSKEDKIHNAENIQPGEQKYEYKSDQWKPPNLEEKKRYDREFLLGFQFIFCQMQKPEGLPHISDVVLDKANKTPLRPLDPTRLQGINCGPDFTPSFANLGRTTLSTRGPPRGGPGGELARGAQAGLGPRRSQQGPRKEPRKIIATVLMTEDIKLNKAEKAWKPSSKRTAADKDRGEEDADGSKTQDLFRRWRSILNKLTPQMFQQLMKQVTQLAIDTEDASKGSLTSFLRRPFQSPTSLWPIQHVPLPHGAESAHYGKPTVTVNFRKLLLNRCQKEFEKDKDDDEVFEKKQKEMDEAATAEERERLKEELEEARDIARRCSLGNIKFIGELFKLKMLTEAIMHDCVVKLLKNHDEESLECLCRLLTTIGKDLDFEKAKPRMDQYFNQMEKIIKEKKTSSRIRFMLQDVLDLRGSNWVPRRGDQGPRPLTRSIRRLRWKTSRAHQSAAAHARAVTSVGAVLQALPSAVDFPLWMMVADTVPISKGSRPIDTSRLTKITKPGSIDSNNQLFAPGGRLSWGKGSSGGSGAQPSDAASEAARPATSTLIRFSALQQAVPTESTDNRRVVQRSSLSRERGEKAGDRGDRLERVNGEGTVGTGLIVSRTPATKRTFSKEVEERSRERPSQPEGLRKAASLTEDRDRGRDAVKREAALPPVSPLKAALSEEELEKKSKAIIEEYLHLNDMKEAVQCVQELASPSLLFIFVRHGVESTLERSAIAREHMGQLLHQLLCAGHLSTAQYYQGLYEILELAEDMEIDIPHVWLYLAELVTPILQEGGVPMGELFREITKPLRPLGKAASLLLEILGLLCKSMGPKKVGTLWREAGLSWKEFLPEGQDIGAFVAEQKVEYTLGEESEAPGQRALPSEELNRQLEKLLKEGSSNQRVFDWIEANLSEQIVSNTLVRALMTAVCYSAIIFETPLRVDVAVLKGDIVLQKYLCDEAEGATGALRLQALVVTLEQPPNLLRMFFDALYDEDVVKEDAFYSWESSKDPAEQQGKGVALKSVTAFFKWLREVRGGV

SEQ ID NO: 573 - DNA, 3033 bp, Homo sapien
ggtaagagaagactggaagcatgtcggagttttggttaatttctgcccctggcgataaggaaaatttgcaagctctggagaggatgaatactgtaacctccaagtccaacctgtcttataataccaaattcgctattcctgacttcaaggtggggaccttggattccctggttggcctctctgatgagttggggaaactcgacacctttgctgaaagcctcataaggagaatggctcagagcgtggtggaagtcatggaggactcaaaggggaaggtccaggagcacctcctggcaaacggagttgacttaacatcctttgtgacccactttgaatgggacatggccaaatatcctgtcaagcagccgctcgtgagtgtggtggacacaatagccaagcaactggcgcagatcgagatggacctgaagtcccgaacggccgcctacgacactctgaagacaaacctggagaacctggaaaagaaatccatggggaacctcttcacccggacactgagtgatattgtgagcaaagaggacttcgtgctggattctgaatatctcgtcacacttctggtcatcgtccccaaaccaaactactcacaatggcaaaaaacctacgaatctctctcagacatggtggtccctcgatcaaccaaactcattactgaggacaaggaagggggccttttcactgtgactctgtttcgaaaagtgattgaagatttcaaaaccaaggccaaagaaaacaagttcactgttcgtgaattttactatgatgagaaggaaattgaaagggaaagggaggagatggccagattgctgtctgataagaagcaacagtatggccccctgctgcgctggctcaaggtgaacttcagtgaagccttcattgcctggatccacatcaaggccctgagagtgtttgtggagtccgtgctcaggtatggactaccagtgaacttccaggcagtgctcctgcagccgcataagaagtcatccaccaagcgtttaagagaggttctaaactctgtcttccgacatctggatgaagtagccgctacaagtatactggatgcatctgtggagatcccgggactgcaactcaataaccaagactattttccttatgtctacttccatattgaccttagtcttcttgactagaaaggccagctggcacctctgtctcatgttcgtgcagattattacagacacctctttcctttagccagagaatggttcaaatgtcttacagaactaagatctttttcagagaaattgctcacaaaagttagtgacagttgtatttatttttttaagttacaataaaatgctctcaagtcctttgaatgttccaacaaattcaaaacttcattttctgaatgttttacataaatgcgaactacctgttcgcattggtaacctgctgctgtatttcatgtcttaacggctattttgaggttcattaacaacatagaaagccttgaactgtataaccagctagattccttaataattagtcactagagacagcccaaagacaaatattgggcaggaaatcagttctcactgagcccggtttccatgtaaaatctctgttgtggtgggcataggtggcaccatctaaagaaaagaggtcttgttttttgtttaaaaaagtttgtggggaggaaagacatctgtgtatcacttcaaaatattgatttactgctaaacatcactctgaatttatgatgtggatactaacttcatacatttatcggcattgtccaaaatattttattctttaatggaaaaagccattaatattcaaatgaagggatcacattaaaaaaaacccatacataagaaacagcctccaagaacattcaagcagcagtcagagagaaaaatgtttcgacagccaagttttcttcaaaatattatgtgacagaatacgactcaattcaccggctacaacaattcatagaatttttcaatgttttcttgagatgcaaaagttcactgttgcagtgttttcaaatgaccaatcaagtactacttcttggttaaaaggccactggtagagtcatctgagtgtagagaatgtcccttcactgctggaaaaatccactggctcccaagaaaagaaaatggtctgaagcctctgttgtggctctcacaactcatctttccctaagtcatcaagctccacatcactgaggtcaatgtcatcctccacgggaagctgggagacgacagaaagccactgttagatctgcagaaggggacaccctggaaggtcaacatctcattttatggaagagcgactctctggagctactcctgctacaatccaggttctcctcagtctgactcctaccctgaccttcgtacctatgattatacggatggaaaagctcagaactcaggtgaaacatttcaacatcacatcactcaccattttaacactggaagccacttgaacgtgtccttttgaggagggtgggacacaacagtacagaaataagtgctaatttcaaagctatcattttctatttttctaagataaagtaaatgaattccaggttaaatgttcactttaaggtaataatcaggaaagcaaccttactactgaaatgtatcttggctgtcaagagtatcaaatgccatgcagcacttaaacttgtgataaggaagatgaagggtcttcagagaagaacctcttaaaaggcccacgggtgcaccagggctgaggtctgatgggaaggacttgactccaggtgcagagatgcacaggctcaagagagtaaaccaggactgctgcccgcacagcttccctcccgggcactcacctcgccatccctgccgtcccaaggctctctctcaacgatggtagggaaagccccgcctcctacaggtgccgtggagccacgcccaaaagagagctcccttagggaaaaatgaccaaaacacacacacacatttacaatggactgctggtgcagaagaataaacaactttaaaaataaaaaaaaaaaaaaaaaaaaaa

SEQ ID NO: 574 - protein, 381 aa, Homo sapien
MSEFWLISAPGDKENLQALERMNTVTSKSNLSYNTKFAIPDFKVGTLDSLVGLSDELGKLDTFAESLIRRMAQSVVEVMEDSKGKVQEHLLANGVDLTSFVTHFEWDMAKYPVKQPLVSVVDTIAKQLAQIEMDLKSRTAAYDTLKTNLENLEKKSMGNLFTRTLSDIVSKEDFVLDSEYLVTLLVIVPKPNYSQWQKTYESLSDMVVPRSTKLITEDKEGGLFTVTLFRKVIEDFKTKAKENKFTVREFYYDEKEIEREREEMARLLSDKKQQYGPLLRWLKVNFSEAFIAWIHIKALRVFVESVLRYGLPVNFQAVLLQPHKKSSTKRLREVLNSVFRHLDEVAATSILDASVEIPGLQLNNQDYFPYVYFHIDLSLLD

SEQ ID NO: 575 - DNA, 1902 bp, Homo sapien
agatctgaatccagaggctctcggaggaagagctcaggccactgaggcggctcccagctgcgttggcgacatggccgacacccccagagatgccgggctcaagcaggcgcctgcatcacggaacgagaaggccccggtggacttcggctacgtggggattgactccatcctggagcagatgcgccggaaggccatgaagcagggcttcgagttcaacatcatggtggtcgggcagagcggcttgggtaaatccaccttaatcaacaccctcttcaaatccaaaatcagccggaagtcggtgcagcccacctcagaggagcgcatccccaagaccatcgagatcaagtccatcacgcacgatattgaggagaaaggcgtccggatgaagctgacagtgattgacacaccagggttcggggaccacatcaacaacgagaactgctggcagcccatcatgaagttcatcaatgaccagtacgagaaatacctgcaggaggaggtcaacatcaaccgcaagaagcgcatcccggacacccgcgtccactgctgcctctacttcatccccgccaccggccactccctcaggcccctggagcagaaagtgcctttatctcagccatccgcagactgctcggccagatgcggggacaggctggaatgagggaggcgtcttcatctccctgccatccccctctcacgccacccccgcccccaccgggctgcaggtgctgctgatgcgctgggatctgattgaggataaaaaggaaggagagatgacccctaccccctcatcccccagttttgaaaaggtctaagcaagtgagtctggtggaggagctgagggagggagccatggaaggtgccagaaggaaggttggcgggggcacgtgtgggccgtggcttgggctggtcagagtggcgtgagctgcccggcgcctgccctgcccaagtgaccagggaagtgtgtgtgtgtccatgtgtatgcgtgtccgtctgtctgtctagtgtctgggtttggcccaagactgggctgtagttacattaatgcccagccagccacccctgccactcacccctcctggcccaggccttgctgactctctgagctggggaggtgggaggccaggcgagcctgactctgttgatctacccgtgcctgggcccctcccctcagagcccatggtaacgaacccctagaaaggagagaacgggcgtcaggggtgcacagtccacagctgaagagcaaggtttcgtggcagcacggcccggcccctcaccctctgtccccacgaggggacccatgggggctgtctttgcagggcacagatgaccaaagtcccttcctgcttcctgttacctgtcttgctcctggggagaaagaggggcctgatgagactccactcaggtgcacacatcaccaggtgcatctgcaggcaccgggctggctgcttgcagccaggagaaggtcagcgagaaggagtgtatgagtgtgagtgtgtgtgcatggaagttggggcactgggcgtctgactccctccccacccaagagaggaaggacccctcaccacccccactggcgagacagtttactttgccgacttgccatgtttttgccaaaaccaagattttgaaggaaatgagtggccagcgccagggcccaggccatgtggcctgcccagcctcaatgtcacttggtggcggggtggggtgggggtgggcagcagcatcccagccttgagatgcttcactttccttctctgtaaccagactttgaaaaattgttcgtttcatcaggctctgttcctcaatggccttttgctacgtgcctcccgagaaatttgtctttttgtataaatgacaaagtgttgaaaatgtatttcctgaaataaatgtttcaaatgc

SEQ ID NO: 576 - protein, 196 aa, Homo sapien [sequence omitted]

SEQ ID NO: 577 - DNA, 937 bp, Homo sapien
gttcttgcctggtgtcggtggttagtttctgcgacttgtgttgggactgctgataggaagatgtcttcaggaaatgctaaaattgggcaccctgcccccaacttcaaagccacagctgttatgccagatggtcagtttaaagatatcagcctgtctgactacaaaggaaaatatgttgtgttcttcttttaccctcttgacttcacctttgtgtgccccacggagatcattgctttcagtgatagggcagaagaatttaagaaactcaactgccaagtgattggtgcttctgtggattctcacttctgtcatctagcatgggtcaatacacctaagaaacaaggaggactgggacccatgaacattcctttggtatcagacccgaagcgcaccattgctcaggattatggggtcttaaaggctgatgaaggcatctcgttcaggggcctttttatcattgatgataagggtattcttcggcagatcactgtaaatgacctccctgttggccgctctgtggatgagactttgagactagttcaggccttccagttcactgacaaacatggggaagtgtgcccagctggctggaaacctggcagtgataccatcaagcctgatgtccaaaagagcaaagaatatttctccaagcagaagtgagcgctgggctgttttagtgccaggctgcggtgggcagccatgagaacaaaacctcttctgtattttttttttccattagtaaaacacaagacttcagattcagccgaattgtggtgtcttacaaggcaggcctttcctacagggggtggagagaccagcctttcttcctttggtaggaatggcctgagttggcgttgtgggcaggctactggtttgtatgatgtattagtagagcaacccattaatcttttgtagtttgtattaaacttgaactgag

SEQ ID NO: 578 - protein, 199 aa, Homo sapien
MSSGNAKIGHPAPNFKATAVMPDGQFKDISLSDYKGKYVVFFFYPLDFTFVCPTEIIAFSDRAEEFKKLNCQVIGASVDSHFCHLAWVNTPKKQGGLGPMNIPLVSDPKRTIAQDYGVLKADEGISFRGLFIIDDKGILRQITVNDLPVGRSVDETLRLVQAFQFTDKHGEVCPAGWKPGSDTIKPDVQKSKEYFSKQK

SEQ ID NO: 579 - DNA, 2742 bp, Homo sapien
gtcactcgtataaaaacctatgctttgaaggttctcgtgtgtctcggcctgcaggtctcgctcagagctgtgtccctgaacatccaccctgctggggtggcttgacgcacttctgtgcaaatctgttcgctcgcaaccctacctacctctctcccgaaccggagaaaaccttcggcggggtccttccgggttttgtgtcgaatctgcggcggcgacccggcgccgcgtcacgcggtggtgaatgtgcggcagtacgcgcgccgcgtcgtttacgcggcgatttcatcatgctccgagccggcggcgcgcgccgcttccgtcgccaccctctctggacagcccagggccgcaggctcatgccctctccgcgtccagtgctgcttagaggtgctcgcgccgctctgctgctgctgctgccgccccggctcttagcccgaccctcgctcctcctccgccggtccctcagcgcggcctcctgcgccccgatctccttgcccgccgccgcctcccggagcagcatggacggcgcgggggctgaggaggtgctggcacctctgaggctagcagtgcgccagcagggagatcttgtgcgaaaactcaaagaagataaagcaccccaagtagacgtagacaaagcagtggctgagctcaaagcccgcaagagggttctggaagcaaaggagctggcgttacagcccaaagatgatattgtagaccgagcaaaaatggaagataccctgaagaggaggtttttctatgatcaagcttttgctatttatggaggtgttagtggtctgtatgactttgggccagttggctgtgctttgaagaacaatattattcagacctggaggcagcactttatccaagaggaacagatcctggagatcgattgcaccatgctcacccctgagccagttttaaagacctctggccatgtagacaaatttgctgacttcatggtgaaagacgtaaaaaatggagaatgttttcgtgctgaccatctattaaaagctcatttacagaaattgatgtctgataagaagtgttctgtcgaaaagaaatcagaaatggaaagtgttttggcccagcttgataactatggacagcaagaacttgcggatctttttgtgaactataatgtaaaatctcccattactggaaatgatctatcccctccagtgtcttttaacttaatgttcaagactttcattgggcctggaggaaacatgcctgggtacttgagaccagaaactgcacaggggattttcttgaatttcaaacgacttttggagttcaaccaaggaaagttgccttttgctgctgcccagattggaaattcttttagaaatgagatctcccctcgatctggactgatcagagtcagagaattcacaatggcagaaattgagcactttgtagatcccagtgagaaagaccaccccaagttccagaatgtggcagaccttcacctttatttgtattcagcaaaagcccaggtcagcggacagtccgctcggaaaatgcgcctgggagatgctgttgaacagggtgtgattaataacacagtattaggctatttcattggccgcatctacctctacctcacgaaggttggaatatctccagataaactccgcttccggcagcacatggagaatgagatggcccattatgcctgtgactgttgggatgcagaatccaaaacatcctacggttggattgagattgttggatgtgctgatcgttcctgttatgacctctcctgtcatgcacgagccaccaaagtcccacttgtagctgagaaacctctgaaagaacccaaaacagtcaatgttgttcagtttgaacccagtaagggagcaattggtaaggcatataagaaggatgcaaaactggtgatggagtatcttgccatttgtgatgagtgctacattacagaaatggagatgctgctgaatgagaaaggggaattcacaattgaaactgaagggaaaacatttcagttaacaaaagacatgatcaatgtgaagagattccagaaaacactatatgtggaagaagttgttccgaatgtaattgaaccttccttcggcctgggtaggatcatgtatacggtatttgaacatacattccatgtacgagaaggagatgaacagagaacattcttcagtttccctgctgtagttgctccattcaaatgttccgtcctcccactgagccaaaaccaggagttcatgccatttgtcaaggaattatcggaagccctgaccaggcatggagtatctcacaaagtagacgattcctctgggtcaatcggaaggcgctatgccaggactgatgagattggcgtggcttttggtgtcaccattgactttgacacagtgaacaagaccccccacactgcaactctgagggaccgtgactcaatgcggcagataagagcagagatctctgagctgcccagcatagtccaagacctagccaatggcaacatcacatgggctgatgtggaggccaggtatcctctgtttgaagggcaagagactggtaaaaaagagacaatcgaggaatgaggacaattttgacaacttttgaccacttgcgctaataaaaaaaaaaaaactactcttatgtccactttacaaaagaaaacagcattgtgattactcccagggaccgtattttatcttcagtggctgcctgattttacccccacaattaaagttgaaggaatcctga

SEQ ID NO: 580 - protein, 685 aa, Homo sapien
MDGAGAEEVLAPLRLAVRQQGDLVRKLKEDKAPQVDVDKAVAELKARKRVLEAKELALQPKDDIVDRAKMEDTLKRRFFYDQAFAIYGGVSGLYDFGPVGCALKNNIIQTWRQHFIQEEQILEIDCTMLTPEPVLKTSGHVDKFADFMVKDVKNGECFRADHLLKAHLQKLMSDKKCSVEKKSEMESVLAQLDNYGQQELADLFVNYNVKSPITGNDLSPPVSFNLMFKTFIGPGGNMPGYLRPETAQGIFLNFKRLLEFNQGKLPFAAAQIGNSFRNEISPRSGLIRVREFTMAEIEHFVDPSEKDHPKFQNVADLHLYLYSAKAQVSGQSARKMRLGDAVEQGVINNTVLGYFIGRIYLYLTKVGISPDKLRFRQHMENEMAHYACDCWDAESKTSYGWIEIVGCADRSCYDLSCHARATKVPLVAEKPLKEPKTVNVVQFEPSKGAIGKAYKKDAKLVMEYLAICDECYITEMEMLLNEKGEFTIETEGKTFQLTKDMINVKRFQKTLYVEEVVPNVIEPSFGLGRIMYTVFEHTFHVREGDEQRTFFSFPAVVAPFKCSVLPLSQNQEFMPFVKELSEALTRHGVSHKVDDSSGSIGRRYARTDEIGVAFGVTIDFDTVNKTPHTATLRDRDSMRQIRAEISELPSIVQDLANGNITWADVEARYPLFEGQETGKKETIEE

SEQ ID NO: 581 - DNA, 907 bp, Homo sapien
gtaggaggacctgaaattgagctgattgccatcgcaacaggagggcggatcgtccccaggttctcagagctcacagccgagaagctgggctttgctggtcttgtacaggagatctcatttgggacaactaaggataaaatgctggtcatcgagcagtgtaagaactccagagctgtaaccatttttattagaggaggaaataagatgatcattgaggaggcgaaacgatcccttcacgatgctttgtgtgtcatccggaacctcatccgcgataatcgtgtggtgtatggaggaggggctgctgagatatcctgtgccctggcagttagccaagaggcggataagtgccccaccttagaacagtatgccatgagagcgtttgccgacgcactggaggtcatccccatggccctctctgaaaacagtggcatgaatcccatccagactatgaccgaagtccgagccagacaggtgaaggagatgaaccctgctcttggcatcgactgtttgcacaaggggacaaatgatatgaagcaacagcatgtcatagaaaccttgattggcaaaaagcaacagatatctcttgcaacacaaatggttagaatgattttgaagattgatgacattcgtaagcctggagaatctgaagaatgaagacattgagaaaactatgtagcaagatccacttctgtgattaagtaaatggatgtctcgtgatgcgtctacagttatttattgttacatccttttccagacactgtagatgctataataaaaatagctgtttggtaaccatagtttcacttgttcaaagccgtgtaatcgtgggggtactatctcaactgcttttgtattcattgtattaaaagaatctgtttaagcaaaaaaaaaaaaaaaaaaaaaaaaa

SEQ ID NO: 582 - protein, 171 aa, Homo sapien
MLVIEQCKNSRAVTIFIRGGNKMIIEEAKRSLHDALCVIRNLIRDNRVVYGGGAAEISCALAVSQEADKCPTLEQYAMRAFADALEVIPMALSENSGMNPIQTMTEVRARQVKEMNPALGIDCLHKGTNDMKQQHVIETLIGKKQQISLATQMVRMILKIDDIRKPGESEE

SEQ ID NO: 583 - DNA, 1946 bp, Homo sapien
aattcgggggccgtggagtttgtgacatacgaggtgacacccctcgagtcacttcccttcaactccagctggagcgcctgcttggctttgggttcgttctgcagccttcgccccgctcctagcctcagggccggactccagcgcagagcccagcccagcgcagcctgccagcagccacccagccgcccagccgcccagccccgcacgaaacccggccagagcttcctagcagcccgagccatgaacaccgaaatgtatcagacccccatggaggtggcggtctaccagctgcacaatttctccatctccttcttctcttctctgcttggaggggatgtggtttccgttaagctggacaacagtgcctccggagccagcgtggtggccatagacaacaagatcgaacaggccatggatctggtgaagaatcatctgatgtatgctgtgagagaggaggtggagatcctgaaggagcagatccgagagctggtggagaagaactcccagctagagcgtgagaacaccctgttgaagaccctggcaagcccagagcagctggagaagttccagtcctgtctgagccctgaagagccagctcccgaatccccacaagtgcccgaggcccctggtggttctgcggtgtaagtggctctgtcctcagggtgggcagagccactaaacttgttttacctagttctttccagtttgtttttggctccccaagcatcatctcacgaggagaactttacacctagcacagctggtgccaagagatgtcctaaggacatggccacctgggtccactccagcgacagacccctgacaagagcaggtctctggaggctgagttgcatggggcctagtaacaccaagccagtgagcctctaatgctactgcgccctgggggctcccagggcctgggcaacttagctgcaactggcaaaggagaagggtagtttgaggtgtgacaccagtttgctccagaaagtttaaggggtctgtttctcatctccatggacatcttcaacagcttcacctgacaacgactgttcctatgaagaagccacttgtgttttaagcagaggcaacctctctcttctcctctgtttcgtgaaggcaggggacacagatgggagagattgagccaagtcagccttctgttggttaatatggtataatgcatggctttgtgcacagcccagtgtgggattacagctttgggatgaccgcttacaaagttctgtttggttagtattggcatagtttttctatatagccataaatgcgtatatatacccatagggctagatctgtatcttagtgtagcgatgtatacatatacacatccacctacatgttgaagggcctaaccagccttgggagtattgactggtcccttacctcttatggctaagtctttgactgtgttcatttaccaagttgacccagtttgtcttttaggttaagtaagaactcgagagtaaaggcaaggaggggggccagcctctgaatgcggccacggatgccttgctgctgcaaccctttccccagctgtccactgaaacgtgaagtcctgttttgaatgccaaacccaccattcactggtgctgactacatagaatgggttgagagaagatcagtttgggcttcacagtgtcatttgaaaaagcgtttttgttttgttttgaattattgtggaaaactttcaagtgaacagaaggatggtgtcctactgtggatgagggatgaacaaggggatggctttgatccaatggagcctgggaggtgtgcccagaaagcttgtctgtagcgggttttgtgagagtgaacactttccactttttgacaccttatcctgatgtatggttccaggatttggattttgattttccaaatgtagcttgaaatttcaataaactttgctctgtttttctaaaaaataaaaa

SEQ ID NO: 584 - protein, 134 aa, Homo sapien
MNTEMYQTPMEVAVYQLHNFSISFFSSLLGGDVVSVKLDNSASGASVVAIDNKIEQAMDLVKNHLMYAVREEVEILKEQIRELVEKNSQLERENTLLKTLASPEQLEKFQSCLSPEEPAPESPQVPEAPGGSAV

SEQ ID NO: 585 - DNA, 2427 bp, Homo sapien
gacgtttcgcgccaatttcggttggccggccacagtccaccgcgcggagattctcagcttccccaggagcaagacctctgagcccgccaagcgcggccgcacggccctcggcagcgatggcactgaaggactacgcgctagagaaggaaaaggttaagaagttcttacaagagttctaccaggatgatgaactcgggaagaagcagttcaagtatgggaaccagttggttcggctggctcatcgggaacaggtggctctgtatgtggacctggacgacgtagccgaggatgaccccgagttggtggactcaatttgtgagaatgccaggcgctacgcgaagctctttgctgatgccgtacaagagctgctgcctcagtacaaggagagggaagtggtaaataaagatgtcctggacgtttacattgagcatcggctaatgatggagcagcggagtcgggaccctgggatggtccgaagcccccagaaccagtaccctgctgaactcatgcgcagatttgagctgtattttcaaggccctagcagcagcaagcctcgtgtgatccgggaagtgcgggctgactctgtggggaagttggtaactgtgcgtggaatcgtcactcgtgtctctgaagtcaaacccaagatggtggtggccacttacacttgtgaccagtgtggggcagagacctaccagccgatccagtctcccactttcatgcctctgatcatgtgcccaagccaggagtgccaaaccaaccgctcaggagggcggctgtatctgcagacacggggctccagattcatcaaattccaggagatgaagatgcaagaacatagtgatcaggtgcctgtgggaaatatccctcgtagtatcacggtgctggtagaaggagagaacacaaggattgcccagcctggagaccacgtcagcgtcactggtattttcttgccaatcctgcgcactgggttccgacaggtggtacagggtttactctcagaaacctacctggaagcccatcggattgtgaagatgaacaagagtgaggatgatgagtctggggctggagagctcaccagggaggagctgaggcaaattgcagaggaggatttctacgaaaagctggcagcttcaatcgccccagaaatatacgggcatgaagatgtgaagaaggcactgctgctcctgctagtcgggggtgtggaccagtctcctcgaggcatgaaaatccggggcaacatcaacatctgtctgatgggggatcctggtgtggccaagtctcagctcctgtcatacattgatcgactggcgcctcgcagccagtacacaacaggccggggctcctcaggagtggggcttacggcagctgtgctgagagactccgtgagtggagaactgaccttagagggtggggccctggtgctggctgaccagggtgtgtgctgcattgatgagttcgacaagatggctgaggccgaccgcacagccatccacgaggtcatggagcagcagaccatctccattgccaaggccggcattctcaccacactcaatgcccgctgctccatcctggctgccgccaaccctgcctacgggcgctacaaccctcgccgcagcctggagcagaacatacagctacctgctgcactgctctcccggtttgacctcctctggctgattcaggaccggcccgaccgagacaatgacctacggttggcccagcacatcacctatgtgcaccagcacagccggcagcccccctcccagtttgaacctctggacatgaagctcatgaggcgttacatagccatgtgccgcgagaagcagcccatggtgccagagtctctggctgactacatcacagcagcatacgtggagatgaggcgagaggcttgggctagtaaggatgccacctatacttctgcccggaccctgctggctatcctgcgcctttccactgctctggcacgtctgagaatggtggatgtggtggagaaagaagatgtgaatgaagccatcaggctaatggagatgtcaaaggactctcttctaggagacaaggggcagacagctaggactcagagaccagcagatgtgatatttgccaccgtccgtgaactggtctcagggggccgaagtgtccggttctctgaggcagagcagcgctgtgtatctcgtggcttcacacccgcccagttccaggcggctctggatgaatatgaggagctcaatgtctggcaggtcaatgcttcccggacacggatcacttttgtctgattccagcctgcttgcaaccctggggtcctcttgttccctgctggcctgccccttgggaaggggcagtgatgcctttgaggggaaggaggagcccctctttctcccatgctgcacttactccttttgctaataaaagtgtttgtagattgtc

SEQ ID NO: 586 - protein, 719 aa, Homo sapien [sequence omitted]

SEQ ID NO: 587 - DNA, 1050 bp, Homo sapien
ctttctgcccacactagacatggcgcttgccagcgtgttggagagaccgctaccggtgaaccagcgcgggtttttcggacttgggggtcgtgcagatctgctggatctaggtccagggagtctcagtgatggtctgagcctggccgcgccaggctggggtgtcccagaagagccaggaatcgaaatgcttcatggaacaaccaccctggccttcaagttccgccatggagtcatagttgcagctgactccagggctacagcgggtgcttacattgcctcccagacggtgaagaaggtgatagagatcaacccatacctgctaggcaccatggctgggggcgcagcggattgcagcttctgggaacggctgttggctcggcaatgtcgaatctatgagcttcgaaataaggaacgcatctctgtagcagctgcctccaaactgcttgccaacatggtgtatcagtacaaaggcatggggctgtccatgggcaccatgatctgtggctgggataagagaggccctggcctctactacgtggacagtgaagggaaccggatttcaggggccaccttctctgtaggttctggctctgtgtatgcatatggggtcatggatcggggctattcctatgacctggaagtggagcaggcctatgatctggcccgtcgagccatctaccaagccacctacagagatgcctactcaggaggtgcagtcaacctctaccacgtgcgggaggatggctggatccgagtctccagtgacaatgtggctgatctacatgagaagtatagtggctctaccccctgaaagagggtggatgcagctgcttgtgtttcttggggtgactgtcattggtaatacggacacagtgacccatcctccatcctatttatagtggaagggccttcaattgtatcagtacttttttttaagctctggcacattgacctctatgtgttaccagtcattaatgagctgctgcagaggtgactatttgttttactttcttggatgttaaacattacactactcactactcaatctca

SEQ ID NO: 588 - protein, 263 aa, Homo sapien
MALASVLERPLPVNQRGFFGLGGRADLLDLGPGSLSDGLSLAAPGWGVPEEPGIEMLHGTTTLAFKFRHGVIVAADSRATAGAYIASQTVKKVIEINPYLLGTMAGGAADCSFWERLLARQCRIYELRNKERISVAAASKLLANMVYQYKGMGLSMGTMICGWDKRGPGLYYVDSEGNRISGATFSVGSGSVYAYGVMDRGYSYDLEVEQAYDLARRAIYQATYRDAYSGGAVNLYHVREDGWIRVSSDNVADLHEKYSGSTP

SEQ ID NO: 589 - DNA, 1941 bp, Homo sapien
tctcttgattcctagtctctcgatatggcacctccgtcagtctttgccgaggttccgcaggcccagcctgtcctggtcttcaagctcactgccgacttcagggaggatccggacccccgcaaggtcaacctgggagtgggagcatatcgcacggatgactgccatccctgggttttgccagtagtgaagaaagtggagcagaagattgctaatgacaatagcctaaatcacgagtatctgccaatcctgggcctggctgagttccggagctgtgcttctcgtcttgcccttggggatgacagcccagcactcaaggagaagcgggtaggaggtgtgcaatctttggggggaacaggtgcacttcgaattggagctgatttcttagcgcgttggtacaatggaacaaacaacaagaacacacctgtctatgtgtcctcaccaacctgggagaatcacaatgctgtgttttccgctgctggttttaaagacattcggtcctatcgctactgggatgcagagaagagaggattggacctccagggcttcctgaatgatctggagaatgctcctgagttctccattgttgtcctccacgcctgtgcacacaacccaactgggattgacccaactccggagcagtggaagcagattgcttctgtcatgaagcaccggtttctgttccccttctttgactcagcctatcagggcttcgcatctggaaacctggagagagatgcctgggccattcgctattttgtgtctgaaggcttcgagttcttctgtgcccagtccttctccaagaacttcgggctctacaatgagagagtcgggaatctgactgtggttggaaaagaacctgagagcatcctgcaagtcctttcccagatggagaagatcgtgcggattacttggtccaatccccccgcccagggagcacgaattgtggccagcaccctctctaaccctgagctctttgaggaatggacaggtaatgtgaagacaatggctgaccggattctgaccatgagatctgaactcagggcacgactagaagccctcaaaacccctgggacctggaaccacatcactgatcaaattggcatgttcagcttcactgggttgaaccccaagcaggttgagtatctggtcaatgaaaagcacatctacctgctgccaagtggtcgaatcaacgtgagtggcttaaccaccaaaaatctagattacgtggccacctccatccatgaagcagtcaccaaaatccagtgaagaaacaccacccgtccagtaccaccaaagtagttctctgtcatgtgtgttccctgcctgcacaaacctacatgtacataccatggattagagacacttgcaggactgaaagctgctctggtgaggcagcctctgtttaaaccggccccacatgaagagaacatcccttgagacgaatttggagactgggattagagcctttggaggtcaaagcaaattaagatttttatttaagaataaaagagtactttgatcatgagacataggtatcttgtccctctcactaaaaaggagtgttgtgtgtggcggccacgtgcttctatgtggtgtttgactctgtacaaattctagtcccaaagatcaagttgtctgaaggagccaaagtgtgaatgtgggtgtcggctgcggcattaaattcatcatctcaacccagagtgtctggtctccctgctctttctgcatggttgtgtccctagtcctaagctttggttctttagggtgactgtggtaagaaggatatttaatcatgacatgcacggacacgtacatatttaactgaaacaagttttaccaaacagtatttactcgtgatgtgcgtagtgcattctgatatttttgagccattctattgtgttctacttcacctaaaaaaataaaataaaaatgttgatcaag

SEQ ID NO: 590 - protein, 413 aa, Homo sapien
MAPPSVFAEVPQAQPVLVFKLTADFREDPDPRKVNLGVGAYRTDDCHPWVLPVVKKVEQKIANDNSLNHEYLPILGLAEFRSCASRLALGDDSPALKEKRVGGVQSLGGTGALRIGADFLARWYNGTNNKNTPVYVSSPTWENHNAVFSAAGFKDIRSYRYWDAEKRGLDLQGFLNDLENAPEFSIVVLHACAHNPTGIDPTPEQWKQIASVMKHRFLFPFFDSAYQGFASGNLERDAWAIRYFVSEGFEFFCAQSFSKNFGLYNERVGNLTVVGKEPESILQVLSQMEKIVRITWSNPPAQGARIVASTLSNPELFEEWTGNVKTMADRILTMRSELRARLEALKTPGTWNHITDQIGMFSFTGLNPKQVEYLVNEKHIYLLPSGRINVSGLTTKNLDYVATSIHEAVTKIQ

SEQ ID NO: 591 - DNA, 501 bp, Homo sapien
gaattcgctttggatccatttccatcggtccttacagccgctcgtcagactccagcagccaagatggtgaagcagatcgagagcaagactgcttttcaggaagccttggacgctgcaggtgataaacttgtagtagttgacttctcagccacgtggtgtgggccttgcaaaatgatcaaccctttctttcattccctctctgaaaagtattccaacgtgatattccttgaagtagatgtggatgactgtcaggatgttgcttcagagtgtgaagtcaaatgcacgccaacattccagttttttaagaagggacaaaaggtgggtgaattttctggagccaataaggaaaagcttgaagccaccattaatgaattagtctaatcatgttttctgaaaacataaccagccattggctatttaaacttgtatttttttatttacaaaatataaatatgaagacataaccagttgccatctgcgtgacaataaacattatgctaa

SEQ ID NO: 592 - protein, 105 aa, Homo sapien
MVKQIESKTAFQEALDAAGDKLVVVDFSATWCGPCKMINPFFHSLSEKYSNVIFLEVDVDDCQDVASECEVKCTPTFQFFKKGQKVGEFSGANKEKLEATINELV

SEQ ID NO: 593 - DNA, 2709 bp, Homo sapien
cttggagggagggattagaagccgctagactttttttcctcccctctcagtagcacggagtccgaattaattggatttcattcactggggaggaacaaaaactatctgggcagcttcattgagagagattcattgacactaagagccagcggctgcagctgggtgcagagagaacctccggctttacttctgtctcgtctgccccaaccgctagcctcggcttgggtaaggcgaggcggaattaaaccccgctccgagagcggcagcttcgcgcgcggtgcgctcggcctatgcctgccccgaggggcgtctggtaggcaccccgccctctcccgcagctcgacccccatgatagatacgctcagacccgtgcccttcgcgtcggaaatggcgatcagcaagacggtggcgtggctcaacgagcagctggagctgggcaacgagcggctgctgctgatggactgccggccgcaggagctatacgagtcgtcgcacatcgagtcggccatcaacgtggccatcccgggcatcatgctgcggcgcctgcagaagggtaacctgccggtgcgcgcgctcttcacgcgcggcgaggaccgggaccgcttcacccggcgctgtggcaccgacacagtggtgctctacgacgagagcagcagcgactggaacgagaatacgggcggcgagtcgttgctcgggctgctgctcaagaagctcaaggacgagggctgccgggcgttctacctggaaggtggcttcagtaagttccaagccgagttctccctgcattgcgagaccaatctagacggctcgtgtagcagcagctcgccgccgttgccagtgctggggctcgggggcctgcggatcagctctgactcttcctcggacatcgagtctgaccttgaccgagaccccaatagtgcaacagactcggatggtagtccgctgtccaacagccagccttccttcccagtggagatcttgcccttcctctacttgggctgtgccaaagactccaccaacttggacgtgttggaggaattcggcatcaagtacatcttgaacgtcacccccaatttgccgaatctctttgagaacgcaggagagtttaaatacaagcaaatccccatctcggatcactggagccaaaacctgtcccagtttttccctgaggccatttctttcatagatgaagcccggggcaagaactgtggtgtcttggtacattgcttggctggcattagccgctcagtcactgtgactgtggcttaccttatgcagaagctcaatctgtcgatgaacgatgcctatgacattgtcaaaatgaaaaaatccaacatatcccctaacttcaacttcatgggtcagctgctggacttcgagaggacgctgggactcagcagcccatgtgacaacagggttccagcacagcagctgtattttaccaccccttccaaccagaatgtataccaggtggactctctgcaatctacgtgaaagaccccacatccctccttgctggaatgtgtctggcccttcagcagtttctcttggcagcatcagctgggctgctttctttgtgtgtggccccaggtgtcaaaatgacaccagctgtctgtactagacaaggttaccaagtgcggaattggttaatactaacagagagatttgctccattctctttggaataacaggacatgctgtatagatacaggcagtaggtttgctctgtacccatgtgtacagcctacccatgcagggactgggattcgaggacttccaggcgcatagggtagaaccaaatgatagggtaggagcatgtgttctttagggccttgtaaggctgtttccttttgcatctggaactgactatataattgtcttcaatgaagactaattcaattttgcatatagaggagccaaagagagatttcagctctgtatttgtggtatcagtttggaaaaaaaaatctgatactccatttgattattgtaaatatttgatcttgaatcacttgacagtgtttgtttgaattgtgtttgttttttcctttgatgggcttaaaagaaattatccaaagggagaaagagcagtatgccacttcttaaaacagaacaaaacaaaaaaagaaaattgtgctcttttctaatccaaagggtatatttgcagcatgcttgactttaccaattctgatgacatctttacggacactattatcactaagaccttgttatggcgaagtctttagtctttttcatgtattttcctcatgattttttctctttatgtagtttgactatgccttacctttgtaaatatttttgcttgtgttgtcgcaaaggggataatctgggaaagacaccaaatcatgggctcactttaaaaaaagaaagaataaaaaaaccttcagctgtgctaaacagtatattacctctgtataaaattcttcagggagtgtcacctcaaatgcaatactttgggttggtttctttcctttaaaaaaatttgtataaaactggaagtgtgtgtgtgtgagcatgggtacccatttgataagagaaatgcatttgattgtgaagaagggagagttaaattctccattatgttcgtggtgtaaagtttagagctggaatttattataagaatgtaaaaccttaaattattaataaataactattttggctattgaaaaaaaaaaaaaaaaaaaaaaa

SEQ ID NO: 594 - protein, 381 aa, Homo sapien
MIDTLRPVPFASEMAISKTVAWLNEQLELGNERLLLMDCRPQELYESSHIESAINVAIPGIMLRRLQKGNLPVRALFTRGEDRDRFTRRCGTDTVVLYDESSSDWNENTGGESLLGLLLKKLKDEGCRAFYLEGGFSKFQAEFSLHCETNLDGSCSSSSPPLPVLGLGGLRISSDSSSDIESDLDRDPNSATDSDGSPLSNSQPSFPVEILPFLYLGCAKDSTNLDVLEEFGIKYILNVTPNLPNLFENAGEFKYKQIPISDHWSQNLSQFFPEAISFIDEARGKNCGVLVHCLAGISRSVTVTVAYLMQKLNLSMNDAYDIVKMKKSNISPNFNFMGQLLDFERTLGLSSPCDNRVPAQQLYFTTPSNQNVYQVDSLQST

SEQ ID NO: 595 - DNA, 2390 bp, Homo sapien
ccagcctcggagggagggattagaagccgctagactttttttcctcccctctcagtagcacggagtccgaattaattggatttcattcactggggaggaacaaaaactatctgggcagcttcattgagagagattcattgacactaagagccagcgctgcagctggtgcagagagaacctccggctttgacttctgtctcgtctgccccaaggccgctagcctcggcttgggaaggcgaggcggaattaaaccccgctccgagagcgcacgttcgcgcgcggtgcgtcggccattgcctgccccgaggggcgtctggtaggcaccccgccctctcccgcagctcgacccccatgatagatacgctcagacccgtgcccttcgcgtcggaaatggcgatcagcaagacggtggcgtggctcaacgagcagctggagctgggcaacgagcggctgctgctgatggactgccggccgcaggagctatacgagtcgtcgcacatcgagtcggccatcaacgtggccatcccgggcatcatgctgcggcgcctgcagaagggtaacctgccggtgcgcgcgctcttcacgcgcggcgaggaccgggaccgcttcacccggcgctgtggcaccgacacagtggtgctctacgacgagagcagcagcgactggaacgagaatacgggcggcgagtcgttgctcgggctgctgctcaagaagctcaaggacgagggctgccgggcgttctacctggaaggtggcttcagtaagttccaagccgagttctccctgcattgcgagaccaatctagacggctcgtgtagcagcagctcgccgccgttgccagtgctggggctcgggggcctgcggatcagctctgactcttcctcggacatcgagtctgaccttgaccgagaccccaatagtgcaacagactcggatggtagtccgctgtccaacagccagccttccttcccagtggagatcttgcccttcctctacttgggctgtgccaaagactccaccaacttggacgtgttggaggaattcggcatcaagtacatcttgaacgtcacccccaatttgccgaatctctttgagaacgcaggagagtttaaatacaagcaaatccccatctcggatcactggagccaaaacctgtcccagtttttccctgaggccatttctttcatagatgaagcccggggcaagaactgtggtgtcttggtacattgcttggctggcattagccgctcagtcactgtgactgtggcttaccttatgcagaagctcaatctgtcgatgaacgatgcctatgacattgtcaaaatgaaaaaatccaacatatcccctaacttcaacttcatgggtcagctgctggacttcgagaggacgctgggactcagcagcccatgtgacaacagggttccagcacagcagctgtattttaccaccccttccaaccagaatgtataccaggtggactctctgcaatctacgtgaaagaccccacacccctccttgctggaatgtgtctggcccttcagcagtttctcttggcagcatcagctgggctgctttctttgtgtgtggccccaggtgtcaaaatgacaccagctgtctgtactagacaaggttaccaagtgcggaattggttaatactaacagagagatttgctccattctctttggaataacaggacatgctgtatagatacaggcagtaggtttgctctgtacccatgtgtacagcctacccatgcagggactgggattcgaggacttccaggcgcatagggtagaaccaaatgatagggtaggagcatgtgttctttagggccttgtaaggctgtttccttttgcatctggaactgactatataattgtcttcaagtgaagactaattcaattttgcatatagaggagccaaagagagatttcagctctgtatttgtggtatcagtgttggaaaagagaaatctgatactccatttggattattgtaaatatttgatcttgaatcacttgacagtgtttgtttgaattgtgtttgttttttcctttgatgggcttaaaagaaattatccaaagggagaaagagcagtatgccacttcttaaaacagaacaaaacaaaaaaagaaaattgtgctctgttgtaatccaaaggggagatttgcagcatgcttgactttaccaattctgatgacatctttacggacactattatcactaagaccttgttatggcgaagtctttagtctttttcatgtattttcctcatgattttttctctttatgtagtttgagtatgccttacctttgtaaatatttttgcttgtgttgtcgcaaaggggataatctgggaaagacaccaaatcatgggctcactttaaaa

SEQ ID NO: 596 - protein, 235 aa, Homo sapien
MIDTLRPVPFASEMAISKTVAWLNEQLELGNERLLLMDCRPQELYESSHIESAINVAIPGIMLRRLQKGNLPVRALFTRGEDRDRFTRRCGTDTVVLYDESSSDWNENTGGESLLGLLLKKLKDEGCRAFYLEDEARGKNCGVLVHCLAGISRSVTVTVAYLMQKLNLSMNDAYDIVKMKKSNISPNFNFMGQLLDFERTLGLSSPCDNRVPAQQLYFTTPSNQNVYQVDSLQST

SEQ ID NO: 597 - DNA, 2212 bp, Homo sapien
gctgagtccaagagatagcaaatcgagtcttaaataatccggggagaaagacgcccgggtagatttgaggtgcagccttggagggagggattagaagccgctagactttttttcctcccctctcagtagcacggagtccgaattaattggatttcattcactggggaggaacaaaaactatctgggcagcttcattgagagagattcattgacactaagagccagcggctgcagctgggtgcagagagaacctccggctttacttctgtctcgtctgccccaaccgctagcctcggcttgggtaaggcgaggcggaattaaaccccgctccgagagcggcagcttcgcgcgcggtgcgctcggcctatgcctgccccgaggggcgtctggtaggcaccccgccctctcccgcagctcgacccccatgatagatacgctcagacccgtgcccttcgcgtcggaaatggcgatcagcaagacggtggcgtggctcaacgagcagctggagctgggcaacgagcggctgctgctgatggactgccggccgcaggagctatacgagtcgtcgcacatcgagtcggccatcaacgtggccatcccgggcatcatgctgcggcgcctgcagaagggtaacctgccggtgcgcgcgctcttcacgcgcggcgaggaccgggaccgcttcacccggcgctgtggcaccgacacagtggtgctctacgacgagagcagcagcgactggaacgagaatacgggcggcgagtcggtgctcgggctgctgctcaagaagctcaaggacgagggctgccgggcgttctacctggaaggtggcttcagtaagttccaagccgagttctccctgcattgcgagaccaatctagacggctcgtgtagcagcagctcgccgccgttgccagtgctggggctcgggggcctgcggatcagctctgactcttcctcggacatcgagtctgaccttgaccgagaccccaatagtgcaacagactcggatggtagtccgctgtccaacagccagccttccttcccagtggagatcttgcccttcctctacttgggctgtgccaaagactccaccaacttggacgtgttggaggaattcggcatcaagtacatcttgaacgtcacccccaatttgccgaatctctttgagaacgcaggagagtttaaatacaagcaaatccccatctcggatcactggagccaaaacctgtcccagtttttccctgaggccatttctttcatagatgaagcccggggcaagaactgtggtgtcttggtacattgcttggctggcattagccgctcagtcactgtgactgtggcttaccttatgcagaagctcaatctgtcgatgaacgatgcctatgacattgtcaaaatgaaaaaatccaacatatcccctaacttcaacttcatgggtcagctgctggacttcgagaggacgctgggactcagcagcccatgtgacaacagggttccagcacagcagctgtattttaccaccccttccaaccagaatgtataccaggtggactctctgcaatctacgtgaaagaccccacacccctccttgctggaatgtgtctggcccttcagcagtttctcttggcagcatcagctgggctgctttctttgtgtgtggccccaggtgtcaaaatgacaccagctgtctgtactagacaaggttaccaagtgcggaattggttaatactaacagagagatttgctccattctctttggaataacaggacatgctgtatagatacaggcagtaggtttgctctgtacccatgtgtacagcctacccatgcagggactgggattcgaggacttccaggcgcatagggtagaaccaaatgatagggtaggagcatgtgttctttagggccttgtaaggctgtttccttttgcatctggaactgactatataattgtcttcaatgaagactaattcaattttgcatatagaggagccaaagagagatttcagctctgtatttgtggtatcagtttggaaaaaaaatctgatactccatttgattattgtaaatatttgatcttgaatcacttgacagtgtttgtttgaattgtgtttgttttttcctttgatgggcttaaaagaaattatccaaagggagaaagagcagtatgccacttcttaaaacagaacaaaacaaaaaaaaaaaaaaaaaa

SEQ ID NO: 598 - protein, 381 aa, Homo sapien
MIDTLRPVPFASEMAISKTVAWLNEQLELGNERLLLMDCRPQELYESSHIESAINVAIPGIMLRRLQKGNLPVRALFTRGEDRDRFTRRCGTDTVVLYDESSSDWNENTGGESVLGLLLKKLKDEGCRAFYLEGGFSKFQAEFSLHCETNLDGSCSSSSPPLPVLGLGGLRISSDSSSDIESDLDRDPNSATDSDGSPLSNSQPSFPVEILPFLYLGCAKDSTNLDVLEEFGIKYILNVTPNLPNLFENAGEFKYKQIPISDHWSQNLSQFFPEAISFIDEARGKNCGVLVHCLAGISRSVTVTVAYLMQKLNLSMNDAYDIVKMKKSNISPNFNFMGQLLDFERTLGLSSPCDNRVPAQQLYFTTPSNQNVYQVDSLQST

SEQ ID NO: 599 - DNA, 1332 bp, Homo sapien
ccggcggcgcctcaggtcgcggggcgcctaggcctgggttgtcctttgcatctgcacgtgttcgcagtcgtttccgcgatgctgcctctgctgcgctgcgtgccccgtgtgctgggctcctccgtcgccggcctccgcgctgccgcgcccgcctcgcctttccggcagctcctgcagccggcaccccggctgtgcacccggcccttcgggctgctcagcgtgcgcgcaggttccgagcggcggccgggcctcctgcggcctcgcggaccctgcgcctgtggctgtggctgcggctcgctgcacaccgacggagacaaagcttttgttgatttcctgagtgatgaaattaaggaggaaagaaaaattcagaagcataaaaccctccctaagatgtctggaggttgggagctggaactgaatgggacagaagcgaaattagtgcggaaagttgccggggaaaaaatcacggtcactttcaacattaacaacagcatcccaccaacatttgatggtgaggaggaaccctcgcaagggcagaaggttgaagaacaggagcctgaactgacatcaactcccaatttcgtggttgaagttataaagaatgatgatggcaagaaggcccttgtgttggactgtcattatccagaggatgaggttggacaagaagacgaggctgagagtgacatcttctctatcagggaagttagctttcagtccactggcgagtctgaatggaaggatactaattatacactcaacacagattccttggactgggccttatatgaccacctaatggatttccttgccgaccgaggggtggacaacacttttgcagatgagctggtggagctcagcacagccctggagcaccaggagtacattacttttcttgaagacctcaagagttttgtcaagagccagtagagcagacagatgctgaaagccatagtttcatggcaggctttggccagtgaacaaatcctactctgaagctagacatgtgctttgaaatgattatcatcctaatatcatgggggaaaaaataccaaatttaaattatatgttttgtgttctcatttattatcatttttttctgtacaaatctattatttctagatttttgtataacatgatagacataaaattggtttatctcctccgctgagtcttcctagaagtacctgctgggttctcagttccagttcccatcctttgattgatcactctccctgacatccacctgtatgactttgtcaccaaatgctgtcttctctttctccaatcaagaaataataatccctcgagtttacaaaacaaaaaaaaaaaaaa

SEQ ID NO: 600 - protein, 282 aa, Homo sapien
MLPLLRCVPRVLGSSVAGLRAAAPASPFRQLLQPAPRLCTRPFGLLSVRAGSERRPGLLRPRGPCACGCGCGSLHTDGDKAFVDFLSDEIKEERKIQKHKTLPKMSGGWELELNGTEAKLVRKVAGEKITVTFNINNSIPPTFDGEEEPSQGQKVEEQEPELTSTPNFVVEVIKNDDGKKALVLDCHYPEDEVGQEDEAESDIFSIREVSFQSTGESEWKDTNYTLNTDSLDWALYDHLMDFLADRGVDNTFADELVELSTALEHQEYITFLEDLKSFVKSQ

SEQ ID NO: 601 - DNA, 2856 bp, Homo sapien
gtaaccgctactcccggacaccagaccaccgccttccgtacacaggggcccgcatcccaccctcccggacctaagagcctgggtcccctgtttccggaggtccgcttcccggcccccagattctggcatcccagccctcagtgtccaagacccaggcagcccgggtccccgcctcccggatccaggcgtccgggatctgcgccaccagaacctagcctcctgcagacctccgccatctgggggcactcaacctcctggagccaagggccccacgtcccacccagagaaactctcgtattcccagctcctagggccaaggaacccgggcgctccgaactcccagctttcggacatctggcacacggggcagagcagagaagctcagcgcccagcctggggaatttaaacactccagcttccaagagccaaggaacttcagtgctgtgaactcacaactctaaggagccctccaaagttccagtctccaggtgctgttactcaactcagtcctaggaacgtcgggtcctgggaaggagcccaagcgctcccagccagcttccaggcgctaagaaaccccggtgcttcccatcatggtggccgatcctcctcgagactccaaggggctcgcagcggcggagcccaccgccaacgggggcctggcgctggcctccatcgaggaccaaggcgcggcagcaggcggctactgcggttcccgggaccaggtgcgccgctgccttcgagccaacctgcttgtgctgctgacagtggtggccgtggtggccggcgtggcgctgggactgggggtgtcgggggccgggggtgcgctggcgttgggcccggagcgcttgagcgccttcgtcttcccgggcgagctgctgctgcgtctgctgcggatgatcatcttgccgctggtggtgtgcagcttgatcggcggcgccgccagcctggaccccggcgcgctcggccgtctgggcgcctgggcgctgctctttttcctggtcaccacgctgctggcgtcggcgctcggagtgggcttggcgctggctctgcagccgggcgccgcctccgccgccatcaacgcctccgtgggagccgcgggcagtgccgaaaatgcccccagcaaggaggtgctcgattcgttcctggatcttgcgagaaatatcttcccttccaacctggtgtcagcagcctttcgctcatactctaccacctatgaagagaggaatatcaccggaaccagggtgaaggtgcccgtggggcaggaggtggaggggatgaacatcctgggcttggtagtgtttgccatcgtctttggtgtggcgctgcggaagctggggcctgaaggggagctgcttatccgcttcttcaactccttcaatgaggccaccatggttctggtctcctggatcatgtggtacgcccctgtgggcatcatgttcctggtggctggcaagatcgtggagatggaggatgtgggtttactctttgcccgccttggcaagtacattctgtgctgcctgctgggtcacgccatccatgggctcctggtactgcccctcatctacttcctcttcacccgcaaaaacccctaccgcttcctgtggggcatcgtgacgccgctggccactgcctttgggacctcttccagttccgccacgctgccgctgatgatgaagtgcgtggaggagaataatggcgtggccaagcacatcagccgtttcatcctgcccatcggcgccaccgtcaacatggacggtgccgcgctcttccagtgcgtggccgcagtgttcattgcacagctcagccagcagtccttggacttcgtaaagatcatcaccatcctggtcacggccacagcgtccagcgtgggggcagcgggcatccctgctggaggtgtcctcactctggccatcatcctcgaagcagtcaacctcccggtcgaccatatctccttgatcctggctgtggactggctagtcgaccggtcctgtaccgtcctcaatgtagaaggtgacgctctgggggcaggactcctccaaaattatgtggaccgtacggagtcgagaagcacagagcctgagttgatacaagtgaagagtgagctgcccctggatccgctgccagtccccactgaggaaggaaaccccctcctcaaacactatcgggggcccgcaggggatgccacggtcgcctctgagaaggaatcagtcatgtaaaccccgggagggaccttccctgccctgctgggggtgctctttggacactggattatgaggaatggataaatggatgagctagggctctgggggtctgcctgcacactctggggagccaggggccccagcaccctccaggacaggagatctgggatgcctggctgctggagtacatgtgttcacaagggttactcctcaaaacccccagttctcactcatgtccccaactcaaggctagaaaacagcaagatggagaaataatgttctgctgcgtccccaccgtgacctgcctggcctcccctgtctcagggagcaggtcacaggtcaccatggggaattctagcccccactggggggatgttacaacaccatgctggttattttggcggctgtagttgtggggggatgtgtgtgtgcacgtgtgtgtgtgtgtgtgtgtgtgtgtgtgtgtgtgttctgtgacctcctgtccccatggtacgtcccaccctgtccccagatcccctattccctccacaataacagaaacactcccagggactctggggagaggctgaggacaaatacctgctgtcactccagaggacattttttttagcaataaaattgagtgtcaactatttaaaaaaaaaaaaaaaaa

SEQ ID NO: 602 - protein, 541 aa, Homo sapien
MVADPPRDSKGLAAAEPTANGGLALASIEDQGAAAGGYCGSRDQVRRCLRANLLVLLTVVAVVAGVALGLGVSGAGGALALGPERLSAFVFPGELLLRLLRMIILPLVVCSLIGGAASLDPGALGRLGAWALLFFLVTTLLASALGVGLALALQPGAASAAINASVGAAGSAENAPSKEVLDSFLDLARNIFPSNLVSAAFRSYSTTYEERNITGTRVKVPVGQEVEGMNILGLVVFAIVFGVALRKLGPEGELLIRFFNSFNEATMVLVSWIMWYAPVGIMFLVAGKIVEMEDVGLLFARLGKYILCCLLGHAIHGLLVLPLIYFLFTRKNPYRFLWGIVTPLATAFGTSSSSATLPLMMKCVEENNGVAKHISRFILPIGATVNMDGAALFQCVAAVFIAQLSQQSLDFVKIITILVTATASSVGAAGIPAGGVLTLAIILEAVNLPVDHISLILAVDWLVDRSCTVLNVEGDALGAGLLQNYVDRTESRSTEPELIQVKSELPLDPLPVPTEEGNPLLKHYRGPAGDATVASEKESVM

SEQ ID NO: 603 - DNA, 2820 bp, Homo sapien
gggatttttaaaaaatcaaaatacaaatccaactttttgagttttcgttgtcattgctcttatctttcctgagtcacttcccattttccaaactcagcaaccccagtttgcgagtctggtttcatgaacctttgtaaggtgtttggtgcggtcacrgtgtatacttgccgtgtagtatttgactcagcgcgatctgccttgagtcattttaccgcggccatttactactgccgttgagccctgtccacgccttgggagtgttgatatgttgagagttttctgtctggctgrggagggatcatttagtttttgcggacgtatgttgcactgaggatttagggagagagcaagatttctgttgaggaggttcagaagtataaggaatcgggagagtagataggagtgaagcatttggcagcgtaaagaagcttggcttagctttaatggattagggagagattgctatctagcattattacatgttattgttctctttgctattttatacacctagaacaacctttccctcggggttaacaaacatcttcaactctgttttctgtatggctcctgactcttacctttgttttaggaggcttccctcttcagaggaaactgggagaagccaatttccactgcttctttttcctgtgcctttttaacactcaaacccagaacacttaatcctctgcagctcgtgcaaaaattcagtctgtaatttaaaatgtgtgcacggtacactgctgaccatgggcatgtctattgtttgtatctgtaatgtgtatgtccatttcagtgttgtctgttttagtatgcaggtgatagactagagaacaagacctctgtctccgtagcatcctggagcagtctgaatgccagaatggataaccgttttgctacagcatttgtaattgcttgtgtgcttagcctcatttccaccatctacatggcagcctccattggcacagacttctggtatgaatatcgaagtccagttcaagaaaattccagtgatttgaataaaagcatctgggatgaattcattagtgatgaggcagatgaaaagacttataatgatgcactttttcgatacaatggcacagtgggattgtggagacggtgtatcaccatacccaaaaacatgcattggtatagcccaccagaaaggacagagtcatttgatgtggtcacaaaatgtgtgagtttcacactaactgagcagttcatggagaaatttgttgatcccggaaaccacaatagcgggattgatctccttaggacctatctttggcgttgccagttccttttaccttttgtgagtttaggtttgatgtgctttggggctttgatcggactttgtgcttgcatttgccgaagcttatatcccaccattgccacgggcattctccatctccttgcaggtctgtgtacactgggctcagtaagttgttatgttgctggaattgaactactccaccagaaactagagctccctgacaatgtatccggtgaatttggatggtccttctgcctggcttgtgtctctgctcccttacagttcatggcttctgctctcttcatctgggctgctcacaccaaccggaaagagtacaccttaatgaaggcatatcgtgtggcatgagcaagaaactgcctgctttacaattgccatttttatttttttaaaataatactgatattttccccacctctcaattgtttttaatttttatttgtggatataccattttattatgaaaatctattttatttatacacattcaccactaaatacacacttaataccactaaaatttatgtggtttactttaagcgatgccatctttcaaataaactaatctaggtctagacagaaagaaatggatagagacttgacacaaatttatgaaagaaaattgggagtaggaatgtgaccgaaaacaagttgtgctaatgtctgttagacttttcagtaaaactaaagtaactgtatctgttcaactaaaaactctatattagtttctttgggaaacctctcatcgtcaaaactttatgttcactttgctgttgtagatagccagtcaaccagcagtattagtgctgttttcaaagatttaagctctataaaattgggaaattatctaagatcattttccctaagcattgacacatagcttcatctgaggtgagatatggcagctgtttgtatctgcactgtgtctgtctacaaaaagtgaaaaatacagtgtttacttgaaattttaactttgtaactgcaagaattccagttcagccgggcgaggattagtattatttttaactctccgtaagattttcagtaccaccaaattgttttggattttttttctttcctcttcacataccagggttattaaaagtgtgctttctttttacattatattacagttacaaggtaaaattcctcaactgctatttatttattccagcccagtactataaagaacgtttcaccataatgaccctccagagctgggaaacctaccacaagatctaaagttctggctgtccattaacctccaactatggtctttatttcttgtggtaatatgatgtgcctttccttgcctaaatcccttcctggtgtgtatcaacattatttaatgtcttctaattcagtcatttttttataagtatgtctataaacattgaactttaaaaaacttatttatttattccactactgtagcaattgacagattaaaaaaatgtaacttcataatttcttaccataacctcaatgtcttttttaaaaaataaaattaaaaatgaaaagagaaa

SEQ ID NO: 604 - protein, 253 aa, Homo sapien
MDNRFATAFVIACVLSLISTIYMAASIGTDFWYEYRSPVQENSSDLNKSIWDEFISDEADEKTYNDALFRYNGTVGLWRRCITIPKNMHWYSPPERTESFDVVTKCVSFTLTEQFMEKFVDPGNHNSGIDLLRTYLWRCQFLLPFVSLGLMCFGALIGLCACICRSLYPTIATGILHLLAGLCTLGSVSCYVAGIELLHQKLELPDNVSGEFGWSFCLACVSAPLQFMASALFIWAAHTNRKEYTLMKAYRVA

SEQ ID NO: 605 - DNA, 1577 bp, Homo sapien
ggcacgaggctgctgtttgtctacttcctcctgcttccccgccgccgccgccgccatcatgagggaaatcgtgcacttgcaggccgggcagtgcggcaaccaaatcggcgccaagttttgggaggtgatcagcgatgagcacggcatcgaccccacgggcacctaccacggggacagcgacctgcagctggaacgcatcaacgtgtactacaatgaggccaccggcggcaagtacgtgccccgcgccgtgctcgtggatctggagcccggcaccatggactccgtgcgctcggggcccttcgggcagatcttccggccggacaacttcgttttcggtcagagtggtgctgggaacaactgggccaaggggcactacacagaaggcgcggagctggtggactcggtgctggatgttgtgagaaaggaggctgagagctgtgactgcctgcagggtttccagctgacccactccctgggtggggggactgggtctgggatgggtaccctcctcatcagcaagatccgggaggagtacccagacaggatcatgaacacgtttagtgtggtgccttcgcccaaagtgtcagacacagtggtggagccctacaacgccaccctctcagtccaccagctcgtagaaaacacagacgagacctactgcattgataacgaagctctctacgacatttgcttcagaaccctaaagctgaccacgcccacctatggtgacctgaaccacctggtgtctgctaccatgagtggggtcaccacctgcctgcgcttcccaggccagctcaatgctgacctgcggaagctggctgtgaacatggtcccgtttccccggctgcacttcttcatgcccggctttgccccactgaccagccggggcagccagcagtaccgggcgctgaccgtgcccgagctcacccagcagatgtttgatgccaagaacatgatggctgcctgcgacccccgccatggccgctacctgacggttgccgccgtgttcaggggccgcatgtccatgaaggaggtggatgagcaaatgcttaatgtccaaaacaaaaacagcagctattttgttgagtggatccccaacaatgtgaaaacggctgtctgtgacatcccacctcgggggctaaaaatgtccgccaccttcattggcaacagcacggccatccaggagctgttcaagcgcatctccgagcagttcacggccatgttccggcgcaaggccttcctgcactggtacacgggcgagggcatggacgagatggagttcaccgaggccgagagcaacatgaatgacctggtgtccgagtaccagcagtaccaggatgccacagccgaggaggagggcgagttcgaggaggaggctgaggaggaggtggcctagagccttcagtcactggggaaagcagggaagcagtgtgaactctttattcactcccagcctgtcctgtggcctgtcccactgtgtgcacttgctgttttccctgtccacatccatgctgtacagacaccaccattaaagcattttcatagtgaaaaaaaaaaaaaaaaaaaaaaaaaaaaaa

SEQ ID NO: 606 - protein, 445 aa, Homo sapien
MREIVHLQAGQCGNQIGAKFWEVISDEHGIDPTGTYHGDSDLQLERINVYYNEATGGKYVPRAVLVDLEPGTMDSVRSGPFGQIFRPDNFVFGQSGAGNNWAKGHYTEGAELVDSVLDVVRKEAESCDCLQGFQLTHSLGGGTGSGMGTLLISKIREEYPDRIMNTFSVVPSPKVSDTVVEPYNATLSVHQLVENTDETYCIDNEALYDICFRTLKLTTPTYGDLNHLVSATMSGVTTCLRFPGQLNADLRKLAVNMVPFPRLHFFMPGFAPLTSRGSQQYRALTVPELTQQMFDAKNMMAACDPRHGRYLTVAAVFRGRMSMKEVDEQMLNVQNKNSSYFVEWIPNNVKTAVCDIPPRGLKMSATFIGNSTAIQELFKRISEQFTAMFRRKAFLHWYTGEGMDEMEFTEAESNMNDLVSEYQQYQDATAEEEGEFEEEAEEEVA

SEQ ID NO: 607 - DNA, 2069 bp, Homo sapien
ctatcaatctccagagctttttctttttaagtgtgagcgagtttattagagaagtaaagagacccaagagtgcctactccatagacagagcagccactgtgacactgtacccattaaacactaactctccattgcccctccagcaacccctagcacccactgtctactttctgtctctatgtggttgtctatttgagggacatcacataagtggagtcatatatttgtcctttcatgtctcccttatttcatttagcataacgttttcaagggtttcctgtgttgtgaatatatcagaatttcattctctttttaaggtagaatcatatcattttaaaacatttcagttggaccatctaagttcagtccttcattttcaacaattaaaaaacagccctcaaccgggtgcatctcacgttagctagagacagaactggagctagaagtcagatctcttaccaaagttgcctttcttcttctgtgggtaagtggggcacccttgggacgctgtgctgggcgtacatgggtgcttgatgaagttacttggtggactgatgtgattgatgtccaacatgtatgcagggacagaggctatggtccctacagagcaggcatggagagaaggagaaatacatacgggcaggagccaggagagggagggtgtagtgagcagagaccgcgccactgcactccagcctgagtgacagagtgagaatccatctaaaaaattgcttactaaagaagtggtctcctgaggtcttaagacgttcctggcaatgtcttgagtgggtgggagagagcctccagtcattgagctgtggaatttcagaggtgagaaccacacctaacccccaattactttcccctgtttgcctcagtgacacagctgcaggaaccctggtgggtgttgtattaagtaaatttgacctttattctttgcagatctgtgaaatgttgtcttctgaggggccacgtgtatctgtagtgctgaggactccttggggcctctgaagtcacagagagaacctgcagggtgggggaccagtgtgtgacagccctgctttgcattttctttgagaagtgctgtcattttgcatttctctccaccaggggaatcttcaatcttgagaggtgtgatcataacttgccttgtttcttgtcgctacagagaacggaaggctcccttgatggaacttagacagcaaggccagatgcacatccctggaaggacatccatgttccgagaagaacagatgatccctgtatttcaagacctctgtgcacttatttatgaacctgccctgctcccacagaacacagcaattcctcaggctaagctgccggttcttaaatccatcctgctaagttaatgttgggtagaaagagatacagaggggctgttgaatttcccacataccctccttccaccaagttggaacatccttggaaattgggaagagcacaagaggagatccagggcaaggccattgggatattctgaaacttgaatattttgttttgtgcagagataaagaccttttccatgcaccctcatacacagaaaccaattttcttttttatactcaatcatttctagcgcatggcctggttagaggctggttttttctcttttcctttggtccttcaaaggcttgtagttttgggtagtccttgttctttggaaatacacagtgctgaccagacagcctccccctgtcccctctatgacctcgccctccacaaatgggaaaaccagactacttgggagcaccgcctgtgaaataccaacctgaagacacggttcattcaggcaacgcacaaaacagaaaatgaaggtggaacaagcacatatgttcttcaactgtttttgtctacactctttctcttttcctctacatgctgaaggctgaaagacaggaaagatggtgccatcagcaaatattattcttaattgaaaacttgaaatgtgtatgtttcttactaatttttaaaaatgtattccttgccagggcaggcaaggtcgtcacgcctgtaatcccagcacttcaggaggctgaggtgggcggatc

SEQ ID NO: 608 - DNA, 2228 bp, Homo sapien
  Unsure 230-320: Unknown base
  Unsure 1706-1820: Unknown base
atctcacgttagctagagacagaactggagctagcagtcagatctcttacaaagttgcctttcttcttctgtgggtaagtggggcacccttgggacgctgtgctgggcgtacatgggtgcttgatgaagttacttggtggactgatgtgattgatgtccaacatgtatgcagggacagaggctatggtccctacagagcaggcatggagagaaggagaaatacatacggnnnnnnnnnnnnnnnnnnnnnnnnnnnnnnnnnnnnnnnnnnnnnnnnnnnnnnnnnnnnnnnnnnnnnnnnnnnnnnnnnnnnnnnnnnnttgcttgctaaagaagtggtctcctgaggtcttaagacgttcctgacaatgtcttgagtgggtgggagagaggctgcagtcattgtgctgtggaatttcagaggtgagaaccacacctaaccaaaattactttccctgtttgcctcagtgacacagctgcaggaaccctggtgggtgttgtattaagtaaatttgacctttattctttgcagatctgtgaaatgttgtcttctgaggggccacgtgtatctgtagtgctgaggactccttgggcctctgaagtcacagagagaaccctgcagggtgggggaccagtgtgtgacagccctgctttgcattttctttgagaagtgctgtcattttgcatttctctccaccagggcaatcttcaatcttgagaggtgtgatcataacttgccttgtttcttgtcgctacagagaacggaaggctcccttgatggaacttagacagcaaggccagatgcacatccctggaaggacatccatgttccgagaagaacagatgatccctgtatttcaagacctctgtgcacttatttatgaacctgccctgctcccacagaacacagcaattcctcaggctaagctgccggttcttaaatccatcctgctaagttaatgttgggtagaaagagatacagaggggctgttgaatttcccacataccctccttccaccaagttggaacatccttggaaattggaagagcacaagaggagatccagggcaaggccattgggatattctgaaacttgaatattttgttttgtgcagagataaagaccttttccatgcaccctcatacacagaaaccaattttcttttttatactcaatcatttctagcgcatggcctggttagaggctggttttttctcttttcctttggtccttcaaaggcttgtagttttgggtagtccttgttctttggaaatacacagtgctgaccagacagcctccccctgtcccctctatgacctcgccctccacaaatgggaaaaccagactacttgggagcaccgcctgtgaaataccaacctgaagacaccgttcattcaggcaacgcacaaaacagaaaatgaaggtggaacaagcacagatgttcttcaactgtttttgtctacactctttctcttttcctctaccatgctgaaggctgaaagacaggaagatggtgccatcagcaaatattattcttaattgaaaacttgaaatgtgtatgtttcttactaatttttaaaaatgtattccttgccaggcctagacaaggatcgctcacgcctgtatatcccagcacttcaggtagagctgaggtgggcggtatcgacctgaggtcaggtagctttgagaccagcctgatgaaacnnnnnnnnnnnnnnnnnnnnnnnnnnnnnnnnnnnnnnnnnnnnnnnnnnnnnnnnnnnnnnnnnnnnnnnnnnnnnnnnnnnnnnnnnnnnnnnnnnnnnnnnnnnnnnnnnnntaggttgtagtgtagcggacctcgcgccactggcactcctagctctgagtgactagagtgagaatccatctcaaaaaaacaaataaacaaaattgcttgctaaagaagtggtctcctgaggtcttaagacattcctgacagtgtcttgagtgggtgggagagaggctgctgtcattgcgctgtggaatttcacagatgagaaccacgcctagccaaaatcacttttcctgtttgcctcagtgacacagctgcagggaccctcgtggatgttgtattaaataaatttgacctttgctctttgcagatctgtgaaatgttgtcttctgaggggccacatgcatctatagtgctgaggactccttgggcctctgaagtcacagagagaaccgagcaggtctatgtttttgt

SEQ ID NO: 609 - protein, 114 aa, Homo sapien
  unsure 77: unknown amino acid
  unsure 78: unknown amino acid
  unsure 79: unknown amino acid
  unsure 80: unknown amino acid
  unsure 81: unknown amino acid
  unsure 82: unknown amino acid
  unsure 83: unknown amino acid
  unsure 84: unknown amino acid
  unsure 85: unknown amino acid
  unsure 86: unknown amino acid
  unsure 87: unknown amino acid
  unsure 88: unknown amino acid
  unsure 89: unknown amino acid
  unsure 90: unknown amino acid
  unsure 91: unknown amino acid
  unsure 92: unknown amino acid
  unsure 93: unknown amino acid
  unsure 94: unknown amino acid
  unsure 95: unknown amino acid
  unsure 96: unknown amino acid
  unsure 97: unknown amino acid
  unsure 98: unknown amino acid
  unsure 99: unknown amino acid
  unsure 100: unknown amino acid
  unsure 101: unknown amino acid
  unsure 102: unknown amino acid
  unsure 103: unknown amino acid
  unsure 104: unknown amino acid
  unsure 105: unknown amino acid
  unsure 106: unknown amino acid
LTLARDRTGASSQISYKVAFLLLWVSGAPLGRCAGRTWVLDEVTWWTDVIDVQHVCRDRGYGPYRAGMERRRNTYGXXXXXXXXXXXXXXXXXXXXXXXXXXXXXXLLAKEVVS

SEQ ID NO: 610 - DNA, 1962 bp, Homo sapien
agtgcgcatccggacgtaggaggtggaggttgtggaattcgccgttcgaaagcagggactaaaagccccacttcgtcttacgttccgaaaggaaggcgtctgttgagcctttctctcagtcgtgagggaggcgtcgacggcgtgcggaagtcctgagttgaggcttgcgggatcctttccggagaaagcgcaggctaaagccgcaggtgaagatgtccaactacgtgaacgacatgtggccgggctcgccgcaggagaaggattcgccctcgacctcgcggtcgggcgggtccagccggctgtcgtcgcggtctaggagccgctctttttccagaagctctcggtcccattcccgcgtctcgagccggttttcgtccaggagtcggaggagcaagtccaggtcccgttcccgaaggcgccaccagcggaagtacaggcgctactcgcggtcatactcgcggagccggtcgcgatcccgcagccgccgttaccgagagaggcgctacgggttcaccaggagatactaccggtctccttcgcggtaccggtcccggtcccgtagcaggtcgcgctctcggggaaggtcgtactgcggaagggcgtacgcgatcgcgcggggacagcgctactacggctttggtcgcacagtgtacccggaggagcacagcagatggagggacagatccaggacgaggtcgcggagcagaaccccctttcgcttaagtgaaaaagatcgaatggagctgttagaaatagcaaaaaccaatgcagcgaaagctctaggaacaaccaacattgacttgccagctagtctcagaactgttccttcagccaaagaaacaagccgtggaataggtgtatcaagtaatggtgcaaagcctgaagtaagtattctaggtttgtcggaacaaaactttcagaaagccaactgtcaaatctgattagccacttatatcttagactatactttttgggaagtctagagatgtatataatgtgctaaattcaaagtagcaaatctgaagataggcaatgtcaaacccatgaaaatgggagattaatgagctttatttggccgtgcatggtgcctcatgcctgtaatgaggcagatggcttgagtccaggagttcaagactagcctgggcaatgtggcaaaaccgcgtgtttacaaaaaatacaaaaattagccaggcatggtggtgcatgcctgtagtcccagctgtttgggaggctgaggcaggaggatctttgagcctaggatgctaaggttgcagtgagccaagatggcaccattgcactctagcctgggcagcagagcgagaccctgtctcaaaaaatacatttatttttttcattttcagttaacagtgtactcttataacaccgttattagctggtactttggtgatttctattactagtttttctaagctatttacagagtgtttgtagctttcatttgcagcattatgttcccacaaattctgtactcagcatatacagtatagtttatctgctctatttctgtcttatagaaatcatgaatgtggtctgcagacattgatgaagaaaatctgttggtaattgatacatgggctaaagcatcagaggtttaatttgaagtttatgttcacacactgaaaacttagtttttttgttggtagatccatgtgcatgctagaatttgggacaggcactatttgcataaagtattaaagtcaatttttaaactaagcaaaggtacacgttgtaacggtggggcatctgtgaaaaagatgtccctttcataatatatgcaatatattccagatgttttgagagattacagaagaggaggcctgcttcacttgcagataagtttattataattctccagaaatgtgcaggatgtgcattagcaaattgcactgtacttttcactccagcctgggtgacagagcaagactcccgtctcgggggctt

SEQ ID NO: 611 - protein, 242 aa, Homo sapien
MSNYVNDMWPGSPQEKDSPSTSRSGGSSRLSSRSRSRSFSRSSRSHSRVSSRFSSRSRRSKSRSRSRRRHQRKYRRYSRSYSRSRSRSRSRRYRERRYGFTRRYYRSPSRYRSRSRSRSRSRGRSYCGRAYAIARGQRYYGFGRTVYPEEHSRWRDRSRTRSRSRTPFRLSEKDRMELLEIAKTNAAKALGTTNIDLPASLRTVPSAKETSRGIGVSSNGAKPEVSILGLSEQNFQKANCQI

SEQ ID NO: 612 - DNA, 1431 bp, Homo sapien
ggacgtaggaggtggaggttgtggaattcgccgttcgaaagcagggactaaaagccccacttcgtcttacgttccgaaaggaaggcgtctgttgagcctttctctcagtcgtgagggaggcgtcgacggcgtgcggaagtcctgagttgaggcttgcgggatcctttccggagaaagcgcaggctaaagccgcaggtgaagatgtccaactacgtgaacgacatgtggccgggctcgccgcaggagaaggattcgccctcgacctcgcggtcgggcgggtccagccggctgtcgtcgcggtctaggagccgctctttttccagaagctctcggtcccattcccgcgtctcgagccggttttcgtccaggagtcggaggagcaagtccaggtcccgttcccgaaggcgccaccagcggaagtacaggcgctactcgcggtcatactcgcggagccggtcgcgatcccgcagccgccgttaccgagagaggcgctacgggttcaccaggagatactaccggtctccttcgcggtaccggtcccggtcccgtagcaggtcgcgctctcggggaaggtcgtactgcggaagggcgtacgcgatcgcgcggggacagcgctactacggctttggtcgcacagtgtacccggaggagcacagcagatggagggacagatccaggacgaggtcgcggagcagaaccccctttcgcttaagtgaaaaagatcgaatggagctgttagaaatagcaaaaaccaatgcagcgaaagctctaggaacaaccaacattgacttgccagctagtctcagaactgttccttcagccaaagaaacaagccgtggaataggtgtatcaagtaatggtgcaaagcctgaactgtcggaaaaggtaacagaagatggaactcgaaatcccaatggaaaacctacccagcaaagaagcatagcttttagctctaataattctgtagcaaagccaatacaaaaatcagctaaagctgccacagaagaggcatcttcaagatcaccaaaaatagatcagaaaaaaagtccatatggactgtggatacctatctaaaagaagaaaactgatggctaagtttgcatgaaaactgcactttattgcaagttagtgtttctagcattatcccatccctttgagccattcaggggtacttgtgcatttaaaaaccaacacaaaaagatgtaaatacttaacactcaaatattaacattttaggtttctcttgcagatatgagagatagcacagatggaccaaaggttatgcacaggtgggagtcttttgtatatagttgtaaatattgtcttggttatgtaaaaatgaaattttttagacacagtaattgaactgtattcctgttttgtatatttaataaatttcttgttttcattcttaaaaaaaaaaaaaaaaaa

SEQ ID NO: 613 - DNA, 1696 bp, Homo sapien
ctttttctccatctcagaaccttcctgccgtcgcgtttgcacctcgctgctccagcctctggggcgcattccaaccttccagcctgcgacctgcggagaaaaaaaattacttattttcttgccccatacataccttgaggcgagcaaaaaaattaaattttaaccatgagggaaatcgtgcacatccaggctggtcagtgtggcaaccagatcggtgccaagttctgggaggtgatcagtgatgaacatggcatcgaccccaccggcacctaccacggggacagcgacctgcagctggaccgcatctctgtgtactacaatgaagccacaggtggcaaatatgttcctcgtgccatcctggtggatctagaacctgggaccatggactctgttcgctcaggtccttttggccagatctttagaccagacaactttgtatttggtcagtctggggcaggtaacaactgggccaaaggccactacacagagggcgccgagctggttgattctgtcctggatgtggtacggaaggaggcagagagctgtgactgcctgcagggcttccagctgacccactcactgggcgggggcacaggctctggaatgggcactctccttatcagcaagatccgagaagaataccctgatcgcatcatgaataccttcagtgtggtgccttcacccaaagtgtctgacaccgtggtcgagccctacaatgccaccctctccgtccatcagttggtagagaatactgatgagacctattgcattgacaacgaggccctctatgatatctgcttccgcactctgaagctgaccacaccaacctacggggatctgaaccaccttgtctcagccaccatgagtggtgtcaccacctgcctccgtttccctggccagctcaatgctgacctccgcaagttggcagtcaacatggtccccttcccacgtctccatttctttatgcctggctttgcccctctcaccagccgtggaagccagcagtatcgagctctcacagtgccggaactcacccagcaggtcttcgatgccaaggacatgatggctgcctgtgacccccgccacggccgatacctcaccgtggctgctgtcttccgtggtcggatgtccatgaaggaggtcgatgagcagatgcttaacgtgcagaacaagaacagcagctactttgtggaatggatccccaacaatgtcaagacagccgtctgtgacatcccacctcgtggcctcaagatggcagtcaccttcattggcaatagcacagccatccaggagctcttcaagcgcatctcggagcagttcactgccatgttccgccggaaggccttcctccactggtacacaggcgagggcatggacgagatggagttcaccgaggctgagagcaacatgaacgacctcgtctctgagtatcagcagtaccaggatgccaccgcagaagaggaggaggatttcggtgaggaggccgaagaggaggcctaaggcagagcccccatcacctcaggcttctcagttcccttagccgtcttactcaactgcccctttcctctccctcagaatttgtgtttgctgcctctatcttgttttttgttttttcttctgggggggggtctagaacagtgcctggcacatagtaggcgctcaataaatacttgtttgttgaaaaaaaaaaaaaaaa

SEQ ID NO: 614 - protein, 444 aa, Homo sapien [sequence omitted]

SEQ ID NO: 615 - DNA, 2061 bp, Homo sapien
tgttccgcgatcttctcaggctctcctagcagcatccatcgccgccaccctatcttcactggcttcaccttctccttctctcttcgttgctgagcgacaagcttcctagcgctatgactgtcgtctccgtcccgcagcgggagccgctcgtcctgggtggccgccttgcgccgcttggcttttcctcccgaggttactttggggccctcccgatggtgaccacggctccgcctcctttaccccggatcccggacccccgggcactgcccccgaccctcttcctccctcatttcctagggggagatggcccgtgtctgaccccccagcctcgcgctccagcagctctgcccaaccgcagcctcgccgtggcgggaggcactcctcgggcagcgccgaagaagcggcgaaagaagaaggtgcgggccagccccgcagggcagctgcccagccgcttccaccagtaccagcagcaccggccgagtctggagggcggccggagccccgcgaccggcccgagcggagcgcaggaggtcccgggcccggccgccgccttggccccgagtcctgcagccgcagccggcacggagggagccagccccgaccttgccccgctgcggcccgcggctcccggccaaacccccctcaggaaagaggttttaaaatcaaagatgggaaaatcggagaaaattgcccttccccatggccagcttgttcatggtatacacttgtatgagcaaccaaagataaacagacagaaaagcaaatataacttgccactaaccaagatcacctctgcaaaaagaaatgaaaacaacttttggcaggattctgtttcatctgacagaattcagaagcaggaaaaaaagccttttaaaaataccgagaacattaaaaattcgcatttgaagaaatcagcatttctaactgaagtgagccaaaaggaaaattatgctggggcaaagtttagtgatccaccttctcctagtgttcttccaaagcctcctagtcactggatgggaagcactgttgaaaattccaaccaaaacagggagctgatggcagtacacttaaaaaccctcctcaaagttcaaacttagatttcagatttcagtatgtgtgtaaaacataatttttcccatatccctggactcttgagaaaattggtacagaaatggaaatttgccttgttgcaacatacaattgcaaaagatgagtttaaaaaattacatacaaacagcttgtattatattttatattttgtaaatactgtataccatgtattatgtgtatattgttcatacttgagaggtatattatagttttgttatgaaagtatgtattttgccctgcccacattgcaggtgttttgtatatatacaatggataaattttaagtgtgtgctaaggcacatggaagaccgattttatttgcacaaggtactgagatttttttcaagaaacagctgtcaaatctcaaggtgaagatctaaatgtgaacagtttactaatgcactactgaagtttaaatctgtggcacaatcaatgtaagcatggggtttgtttctctaaattgatttgtaatctgaaattactgaacaactcctattcccatttttgctaaactcaatttctggttttggtatatatccattccagcttaatgcctctaattttaatgccaacaaaattggttgtaatcaaattttaaaataataataatttggcccccccttttaaaatagtcttgactctttgtgtgtgactgtttctcatgtttgaatgtgtgactaggagatgattttgtgtggttggatttttttgacttctactttactggctgagtgtgagccgccatgcctggccataatctacattttcttaccaggagcagcattgaggtttttgagcatagtacttgactactctagaggctgagacgggagcatctcttgagcctgagaagtggagattgcaattgagctaggatcaggccactgcactccagcctgggtaacagacgctgtctcaaaaaaaaggccaagagaaagtaagggagacaga

SEQ ID NO: 616 - protein, 327 aa, Homo sapien
MTVVSVPQREPLVLGGRLAPLGFSSRGYFGALPMVTTAPPPLPRIPDPRALPPTLFLPHFLGGDGPCLTPQPRAPAALPNRSLAVAGGTPRAAPKKRRKKKVRASPAGQLPSRFHQYQQHRPSLEGGRSPATGPSGAQEVPGPAAALAPSPAAAAGTEGASPDLAPLRPAAPGQTPLRKEVLKSKMGKSEKIALPHGQLVHGIHLYEQPKINRQKSKYNLPLTKITSAKRNENNFWQDSVSSDRIQKQEKKPFKNTENIKNSHLKKSAFLTEVSQKENYAGAKFSDPPSPSVLPKPPSHWMGSTVENSNQNRELMAVHLKTLLKVQT

SEQ ID NO: 617 - DNA, 8137 bp, Homo sapien
  Unsure 729-731: Unknown base
agagatgggtctcgccatcaccatgttgcccagtctggtctccaactcctgggctcaagcgatcctcctgccttggtctcccaaagtgctgggattacaggtgtgagcccccacacccggcctgagtgagtgggttctgaatggtgactgttgttgtccatagccttccccctgcttctgagagtggagtccctcccctcatgttggagacctcccaaggtccatgtggtcctataggggctgttcagcctccctagccccttaacgtgtcaggtaatactgtatatattccatgaaatgtgaataattagttatataattcctaagcacttattttaaaaaacagcaatgtgatgcttaactcttcccacctctgttcctgtcccccttagaaaaccactgataactctttttttttttgagacggagtcttgccctgtcgcccaggctggagtgtagtggcctgatctcggctcggctcattgtaacctccgcctcgggtttgagcgattctcctgcctcagcctcctgagtagctgggattataggcgtgcaccaccacgcctggctaattttttgtatctttagtagggacgggtttcaccatgttggccagagtggtcttgaactcctgaccttgtgatccgctcgcctcagcctcccaaagtgctgggattacaggcatgagccaccgtgcctgtcctagaaccactggtaactcttaactgnnnagtgttctaagaacggaagcatctgggctggatggaatttagcatcaagcagagtcccctttctgttcagagtgttgtaaagtgcataaagatgaagcaggcaccagaaatcctcggcagtgccaacgggaagactccgagctgcgaggtgaaccgcgagtgttctgtgttcctcagcaaagcccagctctccagtagcctgcaggagggggtcatgcagaagtttaacggccacgacgccctgccctttattccagccgacaagctgaaagatcttacttcccgggtgtttaatggagaacccggcgcacacgatgccaaactgcgttttgagtcccaggaaatgaaagggattgggacaccccctaacactacccctatcaaaaatggctctccagaaattaagctgaaaatcaccaaaacatacatgaatgggaagcctctctttgaatcttccatttgtggtgacagtgctgctgatgtgtctcagtcagaagaaaatggacaaaaaccagaaaacaaggcgagaaggaacaggaagaggagcataaaatatgactccttgctggagcagggccttgtcgaagcagctcttgtgtctaagatctcaagtccttcagataaaaagattccagctaagaaagagtcttgtccaaacactggaagagacaaagaccacctgttgaaatacaacgttggtgatttggtgtggtccaaagtgtcgggttacccttggtggccttgcatggtttctgcagatccactccttcacagctataccaaacttaaaggtcagaaaaagagtgcacgccagtatcacgtacagttctttggtgacgccccagaaagagcttggatatttgagaagagcctcgtagcttttgaaggagaaggacagtttgaaaaattatgccaggaaagtgccaagcaggcacccacgaaagctgagaaaattaagctattgaaaccaatttcagggaaattgagggcccagtgggaaatgggcattgttcaagcagaagaagctgcaagcatgtcagtggaggagcggaaagccaagttcacctttctctatgtgggggaccagcttcatctcaaccctcaagtagccaaggaggctggcattgctgcagagtctttgggagaaatggcagaatcctcaggagtcagtgaagaagctgctgaaaaccccaagtctgtgagagaagagtgcattcccatgaagagaaggcggagggccaaactgtgtagctctgcagagaccctggagagtcaccccgacatagggaagagtactcctcaaaagacggcagaggctgaccccagaagaggagtagggtctcctcctgggaggaagaagaccacagtctccatgccacgaagcaggaagggagatgcagcatcccagtttttggtcttctgtcaaaaacacagggatgaggtggtagctgagcacccagatgcttcaggtgaggagattgaagagctgctcaggtcacagtggagtctgctgagtgagaagcagagagcacgctacaacaccaagtttgccctggtggcccctgtccaggctgaagaagactctggtaatgtaaatgggaaaaaaagaaaccacacaaagaggatacaggaccctacagaagatgctgaagctgaggacacacccaggaaaagactcaggacggacaagcacagtcttcggaagagagacacaatcactgacaaaacggccagaacaagctcttacaaggccatggaggcagcctcctcgctcaagagccaggcagcaacgaaaaatctgtctgatgcatgtaaaccactgaagaagcgaaatcgggcttccacggcagcatcttcagctcttgggtttagcaaaagttcatctccttctgcatccttaactgagaatgaggtctcggacagcccgggagacgagccctcggagtccccatacgaaagtgcagacgaaacacaaactgaagtatctgtctcatccaaaaagtctgagcgaggagtgactgccaaaaaggagtatgtgtgccagctgtgtgagaagccgggcagcctcctgctctgtgaaggaccctgctgcggagctttccacctcgcctgccttgggctttcccggaggccagaagggaggttcacctgcagcgagtgtgcctcagggattcactcatgtttcgtgtgtaaagagagcaagacagatgttaagcgctgtgtggtaactcagtgtggaaaattttaccatgaggcttgtgtgaaaaaataccctctgactgtatttgagagccgaggtttccgctgccccctccacagctgtgtgagctgccatgcttccaacccttcaaacccaaggccgtcaaaaggtaaaatgatgcggtgtgtccgctgccccgttgcctatcacagcggggatgcttgtctggcagcaggatgctcagtgatcgcctccaacagcatcatctgcactgcccacttcactgctcggaaggggaagcgacaccacgcccacgtcaacgtgagctggtgcttcgtgtgctccaaaggggggagccttctgtgctgtgagtcctgcccagcggccttccaccctgactgcctgaacatcgagatgcctgacggcagctggttctgcaatgactgcagggctgggaagaagctgcacttccaggatatcatttgggtgaaacttgggaactacagatggtggccggcagaagtttgccatcccaaaaatgttcccccaaatattcagaaaatgaagcacgagattggagaattccctgtgtttttctttgggtctaaagattattactggacgcatcaggcgcgagtgttcccgtacatggagggggaccggggcagccgctaccagggggtcagagggatcggaagagtcttcaaaaacgcactgcaagaagctgaagctcgttttcgtgaaattaagcttcagagggaagcccgagaaacacaggagagcgagcgcaagcccccaccatacaagcacatcaaggtgaataagccttacgggaaagtccagatctacacagcggatatttcagaaatccctaagtgcaactgcaagcccacagatgagaatccttgtggctttgattcggagtgtctgaacaggatgctgatgtttgagtgccacccgcaggtgtgtcccgcgggcgagttctgccagaaccagtgcttcaccaagcgccagtacccagagaccaagatcatcaagacagatggcaaagggtggggcctggtcgccaagagggacatcagaaagggagaatttgttaacgagtacgttggggagctgatcgacgaggaggagtgcatggcgagaatcaagcacgcacacgagaacgacatcacccacttctacatgctcactatagacaaggaccgtataatagacgctggccccaaaggaaactactctcgatttatgaatcacagctgccagcccaactgtgagaccctcaagtggacagtgaatggggacactcgtgtgggcctgtttgccgtctgtgacattcctgcagggacggagctgacttttaactacaacctcgattgtctgggcaatgaaaaaacggtctgccggtgtggagcctccaattgcagtggattcctcggggatagaccaaagacctcgacgaccctttcatcagaggaaaagggcaaaaagaccaagaagaaaacgaggcggcgcagagcaaaaggggaagggaagaggcagtcagaggacgagtgcttccgctgcggtgatggcgggcagctggtgctgtgtgaccgcaagttctgcaccaaggcctaccacctgtcctgcctgggccttggcaagcggcccttcgggaagtgggaatgtccttggcatcattgtgacgtgtgtggcaaaccttcgacttcattttgccacctctgccccaattcgttctgtaaggagcaccaggacgggacagccttcagctgcaccccggacgggcggtcctactgctgtgagcatgacttaggggcggcatcggtcagaagcaccaagactgagaagccccccccagagccagggaagccgaaggggaagaggcggcggcggaggggctggcggagagtcacagagggcaaatagcgccaggcggccgcttggccggatccaggggcggtgcagggcggccggccctgcctgcgggagagggcgagcatgaactggcccggaggacccagctcgagccgccaggacacagacgtacaggcctcctcgggagggagcgcctccccaccactgagccatcctcagcagcgtccgctgcgtctgcactgatgaccgtctgagcccagctcagcgttcctggacaaacagcctcactcctcagcgttaccgccacacttgaatttctccgaatgtcaaggttccctcccactctatttttttaggttaaagttaattggcatatggaatgttttaatctcctctgaaatgtgtagcgtaggcttttcccaagggtcgctagaaactcgtcttcgcgttgccccctttctggctctcagcgccgtcgccactcgggagaggctgggtgaggcccgtgtgaggactgaccctggattcctcgaaactgccattgtgatcattactctgctctttggtggctgtatcatttttttgtactaatgtgaattgttcctcagaaacgcttcttttccatcctagtgagaagctggccctgcaggtggtggcagcaatggtgttgtaagatttcctcccgtagttttttctcctcatggatttgaatgaaatgccaataacacgtccactttcaacgtgtagtttacgcggagcactttcgaggcctggccgggttgggcctacttctcacctgggcctatcttctgaactcgctaggttcttatcaacatttgggggataactttgtatatttttttcatttggcttttctttaccagtttctgatttttattctcaatatatttttgctaaacctatttcacaaatcaccaccgactgaagtgtgtgtttactgatgcggccctgagctccatggcgaaaggagtgactttgcagggcgtgagaccgcagtctgcttagagcacaggaagtgacaacttagggagccccgtagggcgctgcaggccccggggaccccagcacgtgggtctaaagagagacggagtctagctctcctgccacccagagtggcttccatctcagcactctgtgggtctggtgatggaagatgcagtctctgctgatcacatgtgccctctgccagggcacctactgagaggtgcggtcctgggggtggaggcctgcctggcaggtgtgcgtgcctcgtacgtgtgttatgggcactggtctaggccaggtatgacacccactctcctgtgagatttcactttagtttttaaaaggtccagttctacagagtgagacctatctatctgagtactacatatgttttaagacttggttctttttttgagggatccttgaccctgggaagtctggagcaccctgagaagggggcaccatgtgtgcctttgcccacgtgtcctgaggggctgcttgtctgggagggagggagagaacattcagcagcaggtgcttttttatggccttttcttaaaataacctaagggggacacatccatcttgcagagaagtttacagaactccccttgaaaactgctgctgaggctcctgttaaattttctgtggcatcttttatgccttggtaaaaactgcagtgtctttggacctgagagtggctactccgtggttttgtgacctgtaagcgtggggttcaggggtgtgtggccctgcagggtcccacgcctccctgagcactgactggaagtttcactggctggtggctgtcccttctcccatcagggtccccagcaaagttaactacacagaggacccaggggaaacgagctgtgtagccactgacttgctcgcgcggccgtggcctctgaggggcactcgccggttaagacagggtgggagtagtgctttccagttcagactctaacttctcccaaagtgtcctaagaaaatactggatcggctcatagatttatgctccttatgatgccctaacttggaaggttgttctagggacaggccgggcagtgtccccacacacaccttagagtcgaaggccccagggccccgctgtcacttgcccaaaagatcccttccggcaggtaagggactaccaatgcttacgtcaaaacagcagaatcggctttgcagtgcactttggggagcagatattaacttatttttgtgttggacagtagtgaaatcttgtgatttttaatcgctttgataatacttccaaattttatgatttttctgaaggaaataatgcaaacattttaaatatgtttctccccctttccaaaaactgttaaactaatgagcaagtaacactaactttgaatgtctctacaatacccgttgataactcagtggagccaggctttggggtagcggccctgagcttgcagggtttctcgccactggggctgaccacgcccccagctgtgaccgtgggtgtggctggctctcggccctgcccagctttgttctgaggacgtggtgacttcctgaacatcagcttcaatcctccatcattaatgtgaagcaaaacacaaaaaccgccccaatccctcaggattccttggcatccgaaaccagcatctgcacctaaacccatacccacccgtgtgcgcccacagggggatgtgtccgaatgggcagcttaaaatgtggtcacctgtgggggaaactcttcaggcacctgaagtgagaacccagctgtccgtcctcaggccggcctttcttccggcgacacccgtccatggctggctgggtccccttcgcagtgtttgtctgtcttgacatctaaaccccggcgtgtgcagtgcccatcttccaggactaccttattttccagaattaaacctgttttataattcaagttaatgcaaatgactgtcagttgccaaatatcttgatcctgtgagtgtagttgatgactgtttgttagtcagtagagtaaaatgctgtgtccacggggtgtcacagcctcaccataccctgttgaggtgtgaaatgccccgtcagaaattaaatacaaacttaaatgtgcctattggtgtctaaacttcatacaatgtaaggtcagattccttttaggaatactgggtgctgtcaccaggtttgatagttagacttaaaaacttgaaattcactttttggggggagggatatactgaaatagagagttgagacttgccagttgggggaaaatagcatttaaaatggaaagctgtgtttggaaaattgtgtatgagtatttttgtattaaaaacattttaaa

SEQ ID NO: 618 - protein, 1365 aa, Homo sapien
MEFSIKQSPLSVQSVVKCIKMKQAPEILGSANGKTPSCEVNRECSVFLSKAQLSSSLQEGVMQKFNGHDALPFIPADKLKDLTSRVFNGEPGAHDAKLRFESQEMKGIGTPPNTTPIKNGSPEIKLKITKTYMNGKPLFESSICGDSAADVSQSEENGQKPENKARRNRKRSIKYDSLLEQGLVEAALVSKISSPSDKKIPAKKESCPNTGRDKDHLLKYNVGDLVWSKVSGYPWWPCMVSADPLLHSYTKLKGQKKSARQYHVQFFGDAPERAWIFEKSLVAFEGEGQFEKLCQESAKQAPTKAEKIKLLKPISGKLRAQWEMGIVQAEEAASMSVEERKAKFTFLYVGDQLHLNPQVAKEAGIAAESLGEMAESSGVSEEAAENPKSVREECIPMKRRRRAKLCSSAETLESHPDIGKSTPQKTAEADPRRGVGSPPGRKKTTVSMPRSRKGDAASQFLVFCQKHRDEVVAEHPDASGEEIEELLRSQWSLLSEKQRARYNTKFALVAPVQAEEDSGNVNGKKRNHTKRIQDPTEDAEAEDTPRKRLRTDKHSLRKRDTITDKTARTSSYKAMEAASSLKSQAATKNLSDACKPLKKRNRASTAASSALGFSKSSSPSASLTENEVSDSPGDEPSESPYESADETQTEVSVSSKKSERGVTAKKEYVCQLCEKPGSLLLCEGPCCGAFHLACLGLSRRPEGRFTCSECASGIHSCFVCKESKTDVKRCVVTQCGKFYHEACVKKYPLTVFESRGFRCPLHSCVSCHASNPSNPRPSKGKMMRCVRCPVAYHSGDACLAAGCSVIASNSIICTAHFTARKGKRHHAHVNVSWCFVCSKGGSLLCCESCPAAFHPDCLNIEMPDGSWFCNDCRAGKKLHFQDIIWVKLGNYRWWPAEVCHPKNVPPNIQKMKHEIGEFPVFFFGSKDYYWTHQARVFPYMEGDRGSRYQGVRGIGRVFKNALQEAEARFREIKLQREARETQESERKPPPYKHIKVNKPYGKVQIYTADISEIPKCNCKPTDENPCGFDSECLNRMLMFECHPQVCPAGEFCQNQCFTKRQYPETKIIKTDGKGWGLVAKRDIRKGEFVNEYVGELIDEEECMARIKHAHENDITHFYMLTIDKDRIIDAGPKGNYSRFMNHSCQPNCETLKWTVNGDTRVGLFAVCDIPAGTELTFNYNLDCLGNEKTVCRCGASNCSGFLGDRPKTSTTLSSEEKGKKTKKKTRRRRAKGEGKRQSEDECFRCGDGGQLVLCDRKFCTKAYHLSCLGLGKRPFGKWECPWHHCDVCGKPSTSFCHLCPNSFCKEHQDGTAFSCTPDGRSYCCEHDLGAASVRSTKTEKPPPEPGKPKGKRRRRRGWRRVTEGK

SEQ ID NO: 619 - DNA, 1944 bp, Homo sapien
aggctgtctgcagagatttgaaaaatggcaacaaatgaaagtgtcagcatctttagttcagcatccttggctgtggaatatgtagattcacttttacctgagaatcctctgcaagaaccatttaaaaatgcttggaactatatgttgaataattatacaaagttccagattgcaacatggggatcccttatagttcatgaagccctttatttcttattctgtttacctggatttttatttcaatttataccttatatgaaaaaatacaaaattcaaaaggataagccagagacatgggaaaaccaatggaagtgtttcaaagttcttctctttaatcacttctgtatccagctgcctttgatttgtggaacctattattttacagagtatttcaatattccttatgattgggaaagaatgccaagatggtattttcttttggcaagatgctttggttgtgcagtcattgaagatacttggcactattttctgcatagactcttacaccacaaaagaatatacaagtatattcataaagttcatcatgagtttcaggctccatttggaatggaagctgaatatgcacatcctttggagactctaattcttggaactggatttttcattggaatcgtgcttttgtgtgatcatgtaattcttctttgggcatgggtgaccattcgtttattagaaactattgatgtccatagtggttatgatattcctctcaaccctttaaatctgatccctttctatgctggttctcggcatcatgatttccaccacatgaacttcattggaaactatgcttcaacatttacatggtgggatcgaatttttggaacagactctcagtataatgcctataatgaaaagaggaagaagtttgagaaaaagactgaataaatatctcacgtaaaccttcctgaaagataaacgttttcctgaattcagaaactagtagctaacattgcttctggagagcagaaataagcatgtcttctggctactaagtgataaaaagaacattaacaacctttaattaccttcctagtgggaactttttctactttacctacaagttctatatatgtagaaatgaataaatatatatttaagtacagttttcatgaggaagttttaaaagaccatgttcctaagcttccaagaaggttttggatactagaagtattaatctatggcttttctcccagtaaaaccataggcctgaagttcacattgggtctttaaatcttttagatatatactggtcatttcagaaaattcttcatagtggtattggccttatatttaactttttttttattttttttttgagacaaagccacactctgtctccttggctggagtgtggtggcacagtctcagctcactgcaacctctgcctcccagttcaagcaattcttctgcctcagcctcccaagtagctgggattacaggcacccgccaccacgcccagctaatttttgtatttttgtagagatggggtttcacgatgttggccaggctggtctcaaacttctgacctcaagtgatctgcccaccttggcctcccaaagtgctgggattacaggtgtaagccactgcgcccggcctttttaactttaaacatgttttagaattcacctaaagatcaaaatatcatggattgaacctcatcaattgatagcagtgagtgactgaagcttccaaatcaagaaaagccggcaccaagaacttccattctaatctagagctgaccagtttgagctgattctctctttgaagagtccttcttgattgcagtgcagtactggcatttctgaatggatgtaagtggagtattttagtctaaaggcttttcaaattacttgaatttttttaaaaattgaggagctttatttctatttacccttccatttttgtgtgaaaaaaaaaaaaaaa

SEQ ID NO: 620 - protein, 293 aa, Homo sapien
MATNESVSIFSSASLAVEYVDSLLPENPLQEPFKNAWNYMLNNYTKFQIATWGSLIVHEALYFLFCLPGFLFQFIPYMKKYKIQKDKPETWENQWKCFKVLLFNHFCIQLPLICGTYYFTEYFNIPYDWERMPRWYFLLARCFGCAVIEDTWHYFLHRLLHHKRIYKYIHKVHHEFQAPFGMEAEYAHPLETLILGTGFFIGIVLLCDHVILLWAWVTIRLLETIDVHSGYDIPLNPLNLIPFYAGSRHHDFHHMNFIGNYASTFTWWDRIFGTDSQYNAYNEKRKKFEKKTE

SEQ ID NO: 621 - DNA, 6996 bp, Homo sapien
gcggggaccgcgacgagcccgggtcgccgttggcagcagcagcagcaacaccagcagcagcagcagccccggcggcggcgcggaaccccgagcgcccgggcgcaccccggcttcccggagcgcgacgcggcggcagcagccccggtgcggccgcgcgcgccttaggctcggccccgcggctcggggaccccgactcccggcccagcgagcgcgtcccccggcgccgcccgagagcccgaggaggcagcggccgcagagcccgggggaggggggcggccaccgcccgcgccgggcatcctcaggagccccagagcgcggagggcgcggcgccgccgagcggtgctggcccccgcgggctccccggaccttccccaccgcctgggcccgagggacgcgtgatcgggcgggcggccgggcgcaagggtgggagggagccgcccccgcccgcgccccctccgcccctcgccccaaacccctgggcgccgggcccgggccgcgcggcctgaagcgcccgcgatggcgagcccgccgcggcacgggccgcccgggccggcgagcggagacggccccaacctcaacaacaacaacaacaacaacaacaaccacagcgtgcgcaagtgcggctacctgcgcaacgaagagcatggccacaagcgcttcttcgtgctgcgcggacccggcgcgggcggcgacgaggcgacggcgggcggggggtcggcgccgcaaccgccgcggctcgagtactacgagagcgagaaaaagtggcggagcaaggcaggcgcgccgaaacgggtgatcgctctcgactgctgcctgaacatcaacaagcgcgccgacgccaagcacaagtacctgatcgccctctacaccaaggacgagtacttcgccgtggccgccgagaacgagcaggagcaggagggctggtaccgcgcgctcaccgacctggtcagcgagggccgcgcggccgccggagacgcgccccccgccgccgcgcccgccgcgtcctgcagcgcctccctgcccggcgccctgggcggctctgccggcgccgccggggccgaggacagctacgggctggtggctcccgccacggccgcctaccgtgaggtgtggcaggtgaacctgaagcccaagggtctgggccagagcaagaacctgacgggggtgtaccgtctgtgcctgtctgcgcgcaccatcggcttcgtgaagctcaactgcgagcagccgtcggtgacgctgcagctcatgaacatccgccgctgcggccactcggacagcttcttcttcatcgaggtgggccgctcggccgtcacaggccccggcgagctgtggatgcaggcggacgactcggtggtggcgcagaacatccacgagaccatcctggaggccatgaaggcgctcaaggagctcttcgagttccggccgcgcagtaagagccaatcgtcggggtcgtcggccacgcaccccatcagcgtccccggcgcgcgccgccaccaccacctggtcaacctgccccccagccagacgggcctggtgcgccgctcgcgcaccgacagcctggccgccaccccgccggcggccaagtgcagctcgtgccgggtgcgcaccgccagcgagggcgacggcggccgggctgcgggagcggcggccgcggcgcagaggctggtgtcggtggctgggagccccctgagccccgggccggtgcgcgcgcccctgagccgctcgcacaccctgagcggcggctgcggcggccgcgggagcaaggtggcgctgctgccggcagggggcgcgctgcaacacagccgctccatgtccatgcccgtggcgcactcgccgcccgccgccaccagccccggctccctgtcgtccagcagcggccacggctcgggctcctacccgccgccgcccggcccgcacccgcctctgccgcatccgctgcaccacggccccggccagcggccctccagcggcagcgcctccgcctcgggctcccccagcgaccccggcttcatgtccctggacgagtacggctccagcccaggcgacctgcgcgccttctgcagccaccgaagcaacacgcccgagtccatcgcggagacgcccccggcccgagacggcggcggcggcggtgagttctacgggtacatgaccatggacaggcccctgagccactgtggccgctcctaccgccgggtctcgggggacgcggcccaggacctggaccgagggctgcgcaagaggacctactccctgaccacgccagcccggcagcggccggtgccccagccctcctctgcctcgctggatgaatacaccctgatgcgggccaccttctcgggcagcgcgggccgcctctgcccgtcctgccccgcgtcctctcccaaggtggcctaccacccctacccagaggactacggagacatcgagatcggctcccacaggagctccagcagcaacctgggggcagacgacggctacatgcccatgacgcccggcgcggccttcgcgggcagtgggagcggcagctgcaggagcgacgactacatgcccatgagccccgccagcgtgtccgcccccaagcagatcttgcagcccagggccgccgccgccgccgccgccgccgtgccttctgcggggcctgcggggccagcacccacctctgcggcgggcaggacattcccggcgagcgggggcggctacaaggccagctcgcccgccgagagctcccccgaggacagtgggtacatgcgcatgtggtgcggttccaagctgtccatggagcatgcagatggcaagctgctgcccaacggggactacctcaacgtgtcccccagcgacgcggtcaccacgggcaccccgcccgacttcttctccgcagccctgcaccccggcggggagccgctcaggggcgttcccggctgctgctacagctccttgccccgctcctacaaggccccctacacctgtggcggggacagcgaccagtacgtgctcatgagctcccccgtggggcgcatcctggaggaggagcgtctggagcctcaggccacgccagggcccagccaggcggccagcgccttcggggccggccccacgcagccccctcaccctgtagtgccttcgcccgtgcggcgtagcggccgccggtcaggtttcttgggccagcgcggccgggcggtgaggcccacgcgcctgtccctggaggggctgcccagcctgcccagcatgcacgagtacccactgccaccggagcccaagagccccggcgagtacatcaacatcgactttggcgagcccggggcccgcctgtcgccgcccgcgcctcccctgctggcgtcggcggcctcgtcctcctcgctcttgtccgccagcagcccggcctcgtcgctgggctcaggcaccccgggcaccagcagcgacagccggcagcggtctccgctctccgactacatgaacctcgacttcagctcccccaagtctcctaagccgggcgccccgagcggccaccccgtgggctccttggacggcctcctgtcccccgaggcctcctccccgtatccgccgttgcccccgcgtccgtccgcgtccccgtcgtcgtctctgcagccgccgccaccgccgccggccccgggggagctgtaccgcctgccccccgcctcggccgttgccaccgcccagggcccgggcgccgcctcatcgttgtcctcggacaccggggacaatggtgactacaccgagatggcttttggtgtggccgccaccccgccgcaacctatcgcggcccccccgaagccagaagctgcccgcgtggccagcccgacgtcgggcgtgaagaggctgagcctcatggagcaggtgtcgggagtcgaggccttcctgcaggccagccagcccccggacccccaccgcggcgccaaggtcatccgcgcagacccgcaggggggccgccgccgccacagttccgagaccttctcctccaccacgacggtcacccccgtgtccccgtccttcgcccacaaccccaagcgccacaactcggcctccgtggaaaatgtctctctcaggaaaagcagcgagggcggcgtgggtgtcggccctggagggggcgacgagccgcccacctccccacgacagttgcagccggcgccccctttggcaccgcagggccggccgtggaccccgggtcagcccgggggcttggtcggttgtcctgggagcggtggatcgcccatgcgcagagagacctctgccggcttccagaatggtctcaactacatcgccatcgacgtgagggaggagcccgggctgccaccccagccgcagccgccgccgccgccgcttcctcagccgggagacaagagctcctggggccggacccgaagcctcgggggtctcatcagcgctgtgggcgtcggcagcaccggcggcgggtgcggggggccgggtcccggtgccctgccccctgccaacacctacgccagcattgacttcttgtcccaccacttgaaggaggccaccatcgtgaaagagtgaagatctgtctggctttatcaccaggatgtcacatgtcagagaatatcattaaaagaagacgctcagcgctgtttcagcccgaagctgcttgcagttttcttttggatctgagcaatgactgtgtttggaaacatctgtggactctgatagatggggcacaacaaggcaaggtcacctgcctctttcccttgttcccggatgggcattcatcattgtgctgtttgcgttttgttttgttttgttttaacaaaattagctgaagaagttattctcaagaaaattggatgttttcattggccttcttaaattgtggccagtgtcttttaatttcttcttcttttccttttggcaaagcagatataaccctcagcatgctaggagagtgcacccgtacctatggaagtggtaaaatctggtatttactggcttacactcaaaacgaccacagtcctacctcagttcaaggtaaagccggatttccgtggcgggggtccacaggacctcctgtagtagcccctgcgctgtgtgtctggagcgcgtcctcgccttatttaaatggtccagtagacagctgcttgttggattccagtgcaggtacctgcgatgtttacgtccacaccgagcccagtgtgggactgacatttctcaatggaagtgaaatttgggattggactttgaagacgattactaaataataattattatatgtaactgaagcaacctacttttgaaaatcaactgtattgggtagtgggaggtgggagggaagggctttgggaaggggatgaatatctctttttacctttaacagacttgtttaatcttctcgatgtagatgtttatgtaggtacttcacattgcaaacgccttttattctatttacaagctcagatgtctctgctctcctgaatcttgggcatgcctttctgtaaccaaaaatccctgtaggcgtgctagcaattccagggtggtccgggtttggcagatttgatttttaaaaaatgtattatctttaataaaaatgttattatgtcaaccagtgaggctgccctgaacaaaaaaaaacaaaaagaaaaaaaaaaaaaggaaagaaagaaactgataaaaagaggcatccagcccctatgttattgatggaaaaagaaaaagaagaaaagcaatctcgcagtacatgttacttgtcgaaaaaattccggacaagactacccttgttttatgttttcagtattctgaaaataccagtgtgtggcagttctcgcagatgttacctaaaactgctgaacttgaccggcagaatgttctgccgttttctgctccctcgacacttgattggagggctgtcgacctctcctcccgtgggggcttccccagtgcctatcttctctgatagtcatggagaggttacactaattcattggagatgtaagttgttggttttgttttgttttgtttttagaaaaatatatataaatatataatagatatctatcgctatagaataatgcattaataaaatgaggcttttttagaggaagaccaaaaaattcaatgtcttaaaaatatatttaatggcaatgcaaaagtcttcctgcttccgtgctgaactttagaacagaggattgtattgcaagacaaagttgaatgtaaagtgatctccctgaacatttttaaggttttacttttctgaaattatacatcacagcagtgcataggccatataatgttagctggaaggtcaatttcagtgtatgatatactttattaagatgtataaaacatcctgaagtttttatttagttttgggaataggcatcagtgggtggtatttgctttgtaactccccccaggtacgatagggactgaatatggaccctgctgaaagcagtgtattgacgcatatttaactcgccctctatccgtagagtagtcatgacactatacagatggttcgtgttcatactgcagcttaaaacaagcaaaatacacagatgataatatgctaaattttcctctatcctgtacatttcacaaaaaggcatatgcaatatttacatttttaatttagtttacagaatggaaccaaaatgtataaatgttatgtttgctaaaacttcacaatgtatattgggtctttgtacattttgcctgacttaccttaaatttaaaatattttttgctatataaactttaacagttattaaacagtgttttccttttgggtacgtattgtttctggatatcaagatgttaaatatatttcttgctattgtgatatgacaagagacttaacttatcttgctctgtcttccactgtacacgctgtatataggggtcaatgtgatgctgctggagacgagaataaactggactagaatagtgcattgtatttagtctgtattgatcatggatgccctccttaatagccatatgcaataaaataaagtacattatttatgaaatgaa

SEQ ID NO: 622 - protein, 1338 aa, Homo sapien [sequence omitted]

SEQ ID NO: 623 - DNA, 1457 bp, Homo sapien
gtcaaccagtgaggctgccctgaacaaaaaaaaacaaaaagaaaaaaaaaaaaaaggaaagaaagaaactgataaaaagaggcattccagcccctatgttattgatggaaaaagaaaaagaagaaaagcaatctcgcagtacatgttacttgtgaaaaaattccggacaagactacccttgttttatgttttcagtattctgaaaataccagtgtgtggcagttctcgcagatgttacctaaaactgctgaacttgaccggcagaatgttctgccgttttctgctccctcgacacttgattggagggctgtcgacctctcctcccgtgggggcttccccagtgcctatcttctctgatagtcatggagaggttacactaattcattggagatgtaagttgttggttttgttttgttttgtttttagaaaaatatatataaatatataatagatatctatcgctatagaataatgcattaataaaatgaggcttttttagaggaagaccaaaaaattcaatgtcttaaaaatatatttaatggcaatgcaaaagtcttcctgcttccgtgctgaactttagaacagaggattgtattgcaagacaaagttgaatgtaaagtgatctccctgaacatttttaaggttttacttttctgaaattatacatcacagcagtgcataggccatataatgttagctggaaggtcaatttcagtgtatgatatactttattaagatgtataaaacatcctgaagtttttatttagttttgggaataggcatcaatgggtggtatttgctttgtaactccccccaggtacgatagggactgaatatggaccctgctgaaaagcagtgtattgacgcatatttaactcgccctctatccgtagagtagtcatgacactatacagatggttcgtgttcatactgcagcttaaaacaagcaaaatacacagatgataatatgctaaattttcctctatcctgtacatttcacaaaaaggcatatgcaatatttacatttttaatttagtttacagaatggaaccaaaatgtataaatgttatgtttgctaaaacttcacaatgtatattgggtctttgtacattttgccctgacttaccttaaatttaaaatattttttgctatataaactttaacagttattaaacagtgttttctttttgggtacgtattgtttctggatatcaagatgttaaatatatttcttgctattgtgatatgacaagagacttaacttatcttgctctgtcttccactgtacacgctgtatataggggtcaatgtgatgctgctggagacgagaataaactggactagaatagtgcattgtatttagtctgtattgatcatggatgccctccttaatagccatatgcaataaaataaagtacattatttatgaaaaaaaaaaaaaaaaaaaaaaaaaaaaa

SEQ ID NO: 624 - DNA, 4134 bp, Homo sapien
gggtgattcagcgcccggcgaggcggaacgggccgcaagaggaggaggggagagcccgtccgcgcctgggctcccggggtggcacgagcccgcggccggagtgcgaggcggaggcgaggaggccgcggggacgggaggcgaggccggccgggcccccgaagccatggagaacgcgcacaccaagacggtggaggaggtgctgggccacttcggcgtcaacgagagtacggggctgagcctggaacaggtcaagaagcttaaggagagatggggctccaacgagttaccggctgaagaaggaaaaaccttgctggaacttgtgattgagcagtttgaagacttgctagttaggattttattactggcagcatgtatatcttttgttttggcttggtttgaagaaggtgaagaaacaattacagcctttgtagaaccttttgtaattttactcatattagtagccaatgcaattgtgggtgtatggcaggaaagaaatgctgaaaatgccatcgaagcccttaaggaatatgagcctgaaatgggcaaagtgtatcgacaggacagaaagagtgtgcagcggattaaagctaaagacatagttcctggtgatattgtagaaattgctgttggtgacaaagttcctgctgatataaggttaacttccatcaaatctaccacactaagagttgaccagtcaattctcacaggtgaatctgtctctgtcatcaagcacactgatcccgtccctgacccacgagctgtcaaccaagataaaaagaacatgctgttttctggtacaaacattgctgctgggaaagctatgggagtggtggtagcaactggagttaacaccgaaattggcaagatccgggatgaaatggtggcaacagaacaggagagaacaccccttcagcaaaaactagatgaatttggggaacagctttccaaagtcatctcccttatttgcattgcagtctggatcataaatattgggcacttcaatgacccggttcatggagggtcctggatcagaggtgctatttactactttaaaattgcagtggccctggctgtagcagccattcctgaaggtctgcctgcagtcatcaccacctgcctggctcttggaactcgcagaatggcaaagaaaaatgccattgttcgaagcctcccgtctgtggaaacccttggttgtacttctgttatctgctcagacaagactggtacacttacaacaaaccagatgtcagtctgcaggatgttcattctggacagagtggaaggtgatacttgttcccttaatgagtttaccataactggatcaacttatgcacctattggagaagtgcataaagatgataaaccagtgaattgtcaccagtatgatggtctggtagaattagcaacaatttgtgctctttgtaatgactctgctttggattacaatgaggcaaagggtgtgtatgaaaaagttggagaagctacagagactgctctcacttgcctagtagagaagatgaatgtatttgataccgaattgaagggtctttctaaaatagaacgtgcaaatgcctgcaactcagtcattaaacagctgatgaaaaaggaattcactctagagttttcacgtgacagaaagtcaatgtcggtttactgtacaccaaataaaccaagcaggacatcaatgagcaagatgtttgtgaagggtgctcctgaaggtgtcattgacaggtgcacccacattcgagttggaagtactaaggttcctatgacctctggagtcaaacagaagatcatgtctgtcattcgagagtggggtagtggcagcgacacactgcgatgcctggccctggccactcatgacaacccactgagaagagaagaaatgcaccttgaggactctgccaactttattaaatatgagaccaatctgaccttcgttggctgcgtgggcatgctggatcctccgagaatcgaggtggcctcctccgtgaagctgtgccggcaagcaggcatccgggtcatcatgatcactggggacaacaagggcactgctgtggccatctgtcgccgcatcggcatcttcgggcaggatgaggacgtgacgtcaaaagctttcacaggccgggagtttgatgaactcaacccctccgcccagcgagacgcctgcctgaacgcccgctgttttgctcgagttgaaccctcccacaagtctaaaatcgtagaatttcttcagtcttttgatgagattacagctatgactggcgatggcgtgaacgatgctcctgctctgaagaaagccgagattggcattgctatgggctctggcactgcggtggctaaaaccgcctctgagatggtcctggcggatgacaacttctccaccattgtggctgccgttgaggaggggcgggcaatctacaacaacatgaaacagttcatccgctacctcatctcgtccaacgtcggggaagttgtctgtattttcctgacagcagcccttggatttcccgaggctttgattcctgttcagctgctctgggtcaatctggtgacagatggcctgcctgccactgcactggggttcaaccctcctgatctggacatcatgaataaacctccccggaacccaaaggaaccattgatcagcgggtggctctttttccgttacttggctattggctgttacgtcggcgctgctaccgtgggtgctgctgcatggtggttcattgctgctgacggtggtccaagagtgtccttctaccagctgagtcatttcctacagtgtaaagaggacaacccggactttgaaggcgtggattgtgcaatctttgaatccccatacccgatgacaatggcgctctctgttctagtaactatagaaatgtgtaacgccctcaacagcttgtccgaaaaccagtccttgctgaggatgcccccctgggagaacatctggctcgtgggctccatctgcctgtccatgtcactccacttcctgatcctctatgtcgaacccttgccactcatcttccagatcacaccgctgaacgtgacccagtggctgatggtgctgaaaatctccttgcccgtgattctcatggatgagacgctcaagtttgtggcccgcaactacctggaacctggtaaagagtgtgtgcagcctgccaccaaatcctgctcgttctcggcatgcaccgatgggatttcctggccgtttgtgctgctcataatgcccctggtgatctgggtctatagcacagacactaactttagcgatatgttctggtcttgactgacagttttccataaagaagatgtttaacttaatcaattaatttttttattgtttaaagcaactgtctatttctgctgaattttcacatgaacatactggctggtgatggaggtttcatactctagattttgttttgctttttctgactccagtggggcaagattttccttttttatacacataattaaagtgtccattgacatgtacagagaactaacactattttatgcaaatatttttttgtagatgaaaaagcatgtacagtgttctgtttaatactcatccttgtataaaaaaaatagttgagccagcagacattgtcagcaaattaattggcagcagattttaggaaatgaatgtgtgtggttttttttctaaaactaaatagcatgtattgtgtcttttgcatgatgatccggatttaatttgatatcacagtctaatttttattcataagccaatttttctgcactgagcagagtcttgctacctcagtcagtattgttttggtttgctacttccctcacccactttggcctccgttcaccccaccccaccccacctctccccaccttacccccgccccgcttggcttcttctttaggattgtgatggttcgttctgtttacatcagttttaacgagaggtatgcctgtactcgcttgtgcagaaaacattgttccagattcaatcgactgggtttatgtcccttcacatagtttttaaggttatttatttaaatgtctaatgtattttattgtaacagacattgttttgccaacattgcctatttcagtggcacgtcatctagttttaaaaaaataaaacattttaaaaag

SEQ ID NO: 625 - protein, 1042 aa, Homo sapien
MENAHTKTVEEVLGHFGVNESTGLSLEQVKKLKERWGSNELPAEEGKTLLELVIEQFEDLLVRILLLAACISFVLAWFEEGEETITAFVEPFVILLILVANAIVGVWQERNAENAIEALKEYEPEMGKVYRQDRKSVQRIKAKDIVPGDIVEIAVGDKVPADIRLTSIKSTTLRVDQSILTGESVSVIKHTDPVPDPRAVNQDKKNMLFSGTNIAAGKAMGVVVATGVNTEIGKIRDEMVATEQERTPLQQKLDEFGEQLSKVISLICIAVWIINIGHFNDPVHGGSWIRGAIYYFKIAVALAVAAIPEGLPAVITTCLALGTRRMAKKNAIVRSLPSVETLGCTSVICSDKTGTLTTNQMSVCRMFILDRVEGDTCSLNEFTITGSTYAPIGEVHKDDKPVNCHQYDGLVELATICALCNDSALDYNEAKGVYEKVGEATETALTCLVEKMNVFDTELKGLSKIERANACNSVIKQLMKKEFTLEFSRDRKSMSVYCTPNKPSRTSMSKMFVKGAPEGVIDRCTHIRVGSTKVPMTSGVKQKIMSVIREWGSGSDTLRCLALATHDNPLRREEMHLEDSANFIKYETNLTFVGCVGMLDPPRIEVASSVKLCRQAGIRVIMITGDNKGTAVAICRRIGIFGQDEDVTSKAFTGREFDELNPSAQRDACLNARCFARVEPSHKSKIVEFLQSFDEITAMTGDGVNDAPALKKAEIGIAMGSGTAVAKTASEMVLADDNFSTIVAAVEEGRAIYNNMKQFIRYLISSNVGEVVCIFLTAALGFPEALIPVQLLWVNLVTDGLPATALGFNPPDLDIMNKPPRNPKEPLISGWLFFRYLAIGCYVGAATVGAAAWWFIAADGGPRVSFYQLSHFLQCKEDNPDFEGVDCAIFESPYPMTMALSVLVTIEMCNALNSLSENQSLLRMPPWENIWLVGSICLSMSLHFLILYVEPLPLIFQITPLNVTQWLMVLKISLPVILMDETLKFVARNYLEPGKECVQPATKSCSFSACTDGISWPFVLLIMPLVIWVYSTDTNFSDMFWS

SEQ ID NO: 626 - DNA, 2623 bp, Homo sapien
gaggaggcccgagaggagtcggtggcagcggcggcggcgggaccggcagcagcagcagcagcagcagcagcaaccactagcctcctgccccgcggcgttgcgacgagccccacgagccgctcaccccgccgttctcagcgctgcccgaccccgctggcgcgcctcccgccgcagtcccggcagcgcctcagttgtcctccgactcgccctcggccttcgcgcagcgcagcacagccgcacgcaccgcagcacagcacagcacagcccaggcatagcttcggcacagccccggctccggctcctgcggcagctcctctggcacgtccctgcgccgacattctggaggttggatgctcttgtccaaaatcaactcgcttgcccacctgcgcgccgcgccctgcaacgacctgcacgccaccaagctggcgcccggcaaggagaaggagcccctggagtcgcagtaccaggtgggcccgctactgggcagcggcggcttcggctcggtctactcaggcatccgcgtctccgacaacttgccggtggccatcaaacacgtggagaaggaccggatttccgactggggagagctgcctaatggcactcgagtgcccatggaagtggtcctgctgaagaaggtgagctcgggtttctccggcgtcattaggctcctggactggttcgagaggcccgacagtttcgtcctgatcctggagaggcccgagccggtgcaagatctcttcgacttcatcacggaaaggggagccctgcaagaggagctggcccgcagcttcttctggcaggtgctggaggccgtgcggcactgccacaactgcggggtgctacaccgcgacatcaaggacgaaaacatccttatcgacctcaatcgcggcgagctcaagctcatcgacttcgggtcgggggcgctgctcaaggacaccgtctacacggacttcgatgggacccgagtgtatagccctccagagtggatccgctaccatcgctaccatggcaggtcggcggcagtctggtccctggggatcctgctgtatgatatggtgtgtggagatattcctttcgagcatgacgaagagatcatcaggggccaggttttcttcaggcagagggtctcttcagaatgtcagcatctcattagatggtgcttggccctgagaccatcagataggccaaccttcgaagaaatccagaaccatccatggatgcaagatgttctcctgccccaggaaactgctgagatccacctccacagcctgtcgccggggcccagcaaatagcagcctttctggcaggtcctcccctctcttgtcagatgcccgagggaggggaagcttctgtctccagcttcccgagtaccagtgacacgtctcgccaagcaggacagtgcttgatacaggaacaacatttacaactcattccagatcccaggcccctggaggctgcctcccaacagtggggaagagtgactctccaggggtcctaggcctcaactcctcccatagatactctcttcttctcataggtgtccagcattgctggactctgaaatatcccgggggtggggggtgggggtgggcagaaccctgccaatggaactctttcttcatcatgagttctgctgaatgccgcgatgggtcaggtaggggggaaacaggttgggatgggataggactagcacattttaagtccctgtcacctcttccgactctttctgagtgccttctgtggggactccggctgtgctgggagaaatacttgaacttgcctcttttacctgctgcttctccaaaaatctgcctgggttttgttccctatttttctctcctgtcctccctcaccccctccttcatatgaaaggtgccatggaagaggctacagggccaaacgctgagccacctgcccttttttctgcctcctttagtaaaactccgagtgaactggtcttcctttttggtttttacttaactgtttcaaagccaagacctcacacacacaaaaaaatgcacaaaccaagcaatcaacagaaaagctgtaaatgtgtgtacagttggcatggtagtatacaaaaagattgtagtggatctaatttttaagaaattttgcctttaagttattttacctgtttttgtttcttgttttgaaagatgcgcattctaacctggaggtcaatgttatgtatttatttatttatttatttggttcccttcctattccaagcttccatagctgctgccctagttttctttcctcctttcctcctctgacttggggaccttttgggggagggctgcgacgcttgctctgtttgtggggtgacgggactcaggcgggacagtgctgcagctccctggcttctgtggggcccctcacctacttacccaggtgggtcccggctctgtgggtgatgggaggggccattgctgactgtgtatataggataattatgaaacacagttctggatggtgtgccttccagatcctctctggggctgtgttttgagcagcaggtagcctgctggttttatctgagtgaaatactgtacaggggaataaaagagatcttattttttttttatacttgcgtttggaataaaaaccctttggcttt

SEQ ID NO: 627 - protein, 313 aa, Homo sapien
MLLSKINSLAHLRAAPCNDLHATKLAPGKEKEPLESQYQVGPLLGSGGFGSVYSGIRVSDNLPVAIKHVEKDRISDWGELPNGTRVPMEVVLLKKVSSGFSGVIRLLDWFERPDSFVLILERPEPVQDLFDFITERGALQEELARSFFWQVLEAVRHCHNCGVLHRDIKDENILIDLNRGELKLIDFGSGALLKDTVYTDFDGTRVYSPPEWIRYHRYHGRSAAVWSLGILLYDMVCGDIPFEHDEEIIRGQVFFRQRVSSECQHLIRWCLALRPSDRPTFEEIQNHPWMQDVLLPQETAEIHLHSLSPGPSK

SEQ ID NO: 628 - DNA, 1679 bp, Homo sapien
gtttgttggctgcggcagcaggtagcaaagtgacgccgagggcctgagtgctccagtagccaccgcatctggagaaccagcggttaccatggaggggatcagtatatacacttcagataactacaccgaggaaatgggctcaggggactatgactccatgaaggaaccctgtttccgtgaagaaaatgctaatttcaataaaatcttcctgcccaccatctactccatcatcttcttaactggcattgtgggcaatggattggtcatcctggtcatgggttaccagaagaaactgagaagcatgacggacaagtacaggctgcacctgtcagtggccgacctcctctttgtcatcacgcttcccttctgggcagttgatgccgtggcaaactggtactttgggaacttcctatgcaaggcagtccatgtcatctacacagtcaacctctacagcagtgtcctcatcctggccttcatcagtctggaccgctacctggccatcgtccacgccaccaacagtcagaggccaaggaagctgttggctgaaaaggtggtctatgttggcgtctggatccctgccctcctgctgactattcccgacttcatctttgccaacgtcagtgaggcagatgacagatatatctgtgaccgcttctaccccaatgacttgtgggtggttgtgttccagtttcagcacatcatggttggccttatcctgcctggtattgtcatcctgtcctgctattgcattatcatctccaagctgtcacactccaagggccaccagaagcgcaaggccctcaagaccacagtcatcctcatcctggctttcttcgcctgttggctgccttactacattgggatcagcatcgactccttcatcctcctggaaatcatcaagcaagggtgtgagtttgagaacactgtgcacaagtggatttccatcaccgaggccctagctttcttccactgttgtctgaaccccatcctctatgctttccttggagccaaatttaaaacctctgcccagcacgcactcacctctgtgagcagagggtccagcctcaagatcctctccaaaggaaagcgaggtggacattcatctgtttccactgagtctgagtcttcaagttttcactccagctaacacagatgtaaaagacttttttttatacgataaataacttttttttaagttacacatttttcagatataaaagactgaccaatattgtacagtttttattgcttgttggatttttgtcttgtgtttctttagtttttgtgaagtttaattgacttatttatataaattttttttgtttcatattgatgtgtgtctaggcaggacctgtggccaagttcttagttgctgtatgtctcgtggtaggactgtagaaaagggaactgaacattccagagcgtgtagtgaatcacgtaaagctagaaatgatccccagctgtttatgcatagataatctctccattcccgtggaacgtttttcctgttcttaagacgtgattttgctgtagaagatggcacttataaccaaagcccaaagtggtatagaaatgctggtttttcagttttcaggagtgggttgatttcagcacctacagtgtacagtcttgtattaagttgttaataaaagtacatgttaaacttacttagtgttatg

SEQ ID NO: 629 - protein, 352 aa, Homo sapien
MEGISIYTSDNYTEEMGSGDYDSMKEPCFREENANFNKIFLPTIYSIIFLTGIVGNGLVILVMGYQKKLRSMTDKYRLHLSVADLLFVITLPFWAVDAVANWYFGNFLCKAVHVIYTVNLYSSVLILAFISLDRYLAIVHATNSQRPRKLLAEKVVYVGVWIPALLLTIPDFIFANVSEADDRYICDRFYPNDLWVVVFQFQHIMVGLILPGIVILSCYCIIISKLSHSKGHQKRKALKTTVILILAFFACWLPYYIGISIDSFILLEIIKQGCEFENTVHKWISITEALAFFHCCLNPILYAFLGAKFKTSAQHALTSVSRGSSLKILSKGKRGGHSSVSTESESSSFHSS

SEQ ID NO: 630 - DNA, 1410 bp, Homo sapien
gagctagctttgcaatatggcggccgaggcggacggaccgcttaaacggctgctcgtgccgattcttttacctgagaaatgctacgaccaacttttcgttcagtgggacttgcttcacgtcccctgcctcaagattctcctcagcaaaggcctggggctgggcattgtggctggctcacttctagtaaagctgccccaggtgtttaaaatccggggagccaagagtgctgaagggttgagtctccagtctgtaatgctggagctagtggcattgactgggaccatggtctacagcatcactaacaacttcccattcagctcttggggtgaagccttattcctgatgctccagacgatcaccatctgcttcctggtcatgcactacagaggacagactgtgaaaggtgtcgctttcctcgcttgctacggcctggtcctgctggtgcttctctcacctctgacgcccttgactgtagtcaccctgctccaggcctccaatgtgcctgctgtggtggtggggaggcttctccaggcagccaccaactaccacaacgggtacacaggccagctctcagccatcacagtcttcctgctgtttgggggctccctggcccgaatcttcacttccattcaggaaaccggagatcccctgatggctgggacctttgtggtctcctctctctgcaacggcctcatcgccgcccagctgctcttctactggaatgcaaagcctccccacaagcagaaaaaggcgcagtagagccagctactggagtcattccgtttccactcattcacccaacctcagggttctccccatctgagccagcctgctggtgtgacttactcatcctccattcctctgcacttgcagactttctgagccagggttttcttttagtggaaacaaatggttgatggatccagatccttagaaaaggagaggatgggggtagagtctcccaagccaaaattttgacatttgagtgctttcgtaagccctgtacatgtactattaattcagtcattcagccaagcctcctcctctagcagcaatttccagctgtttaacactatcctgggcaaatgttttaccctgtcctccagcctccctgcttcccttctggccctggaagactgagtctggacggcagagtggagggactgggaggctgtggctgcctccctccctcagcccggctgggactgtctcccggaccccagtgctggggtgggggaagggggacggagaatgactcaggcagggccccagggtggggtgaggaggttcctgctctggcaggtctaggcggaagggagtggagatggggctggttgctgctgcagtgaggggaacagatgggacaataaagactggagactcagttgaataatgcaaaaaaaaaaaaa

SEQ ID NO: 631 - protein, 247 aa, Homo sapien
MAAEADGPLKRLLVPILLPEKCYDQLFVQWDLLHVPCLKILLSKGLGLGIVAGSLLVKLPQVFKIRGAKSAEGLSLQSVMLELVALTGTMVYSITNNFPFSSWGEALFLMLQTITICFLVMHYRGQTVKGVAFLACYGLVLLVLLSPLTPLTVVTLLQASNVPAVVVGRLLQAATNYHNGYTGQLSAITVFLLFGGSLARIFTSIQETGDPLMAGTFVVSSLCNGLIAAQLLFYWNAKPPHKQKKAQ

SEQ ID NO: 632 - DNA, 1571 bp, Homo sapien
cgggaggtcagaaaaccgggccgcgggcggcaccgacagctggggcccgggtcagggacacgcggaggtcaggccggtgaaggcggcaggaagctggagcacgatcccaggaggaacaatcctgcaccatgactcaacagccacttcgaggagtgaccagcctgcgtttcaaccaagaccaaagctgcttttgctgcgccatggagacaggtgtgcgcatctacaacgtggagcccttgatggagaaggggcatctggaccacgagcaggtgggcagcatgggcttggtggagatgctgcaccgctccaaccttctggccttggtgggcggtggtagtagtcccaagttctcagagatctcagtgctgatctgggacgatgcccgggagggcaaggactccaaggagaagctggtgctggagttcaccttcaccaagccagtgctttctgtgcgcatgcgccatgacaagatcgtgatcgtgctgaagaaccgcatctatgtgtactccttccccgacaatccccgaaagctgtttgagtttgatacccgggacaaccccaaggggctctgtgacctctgccccagcctggagaagcaactgctagtgttcccgggacacaagtgtgggagtctgcaacttgtggacctggcgagcacaaagcctggcacctcgtctgctccattcacgatcaatgcacatcagagtgacatagcctgtgtgtctctaaaccagccaggcactgtagtggcctcagcctcccagaagggtacccttattcgcctctttgacacacaatccaaggagaaactggtggagctgcgccgaggcactgaccctgccaccctctactgcattaacttcagccacgactcctccttcctctgcgcttccagtgataagggtactgtccatatctttgctctcaaggatacccgcctcaaccgccgctccgcgctggctcgcgtgggcaaggtggggcctatgattgggcagtacgtggactctcagtggagcctggcgagcttcactgtgcctgctgagtcagcttgcatctgcgccttcggtcgcaatacttccaagaacgtcaactctgtcattgccatctgcgtagatgggaccttccacaaatatgtcttcactcctgatggaaactgcaacagagaggctttcgacgtgtaccttgacatctgtgatgatgatgacttttaaggaccctgggggctgtgctagggacctgcagtggcagaactgcagagctgagccttggcagtggggcgtgcttggaagccaccagccagcaagcattaatggggctggtgcccactttccactcagcagagctatgtctaaataaagagctcacttccccccagcacttcttgatgactgtgtgccccaagggccaggccagagacccaggaaggcagcgaccccttgggatccctaacctggaggaaattgccagggacccagagggagtgccctaatccaacctggggattttttaaaagcttcctaggaagagatgatctccgatgtgatgaatacgaataaaaggcccttaatggc

SEQ ID NO: 633 - protein, 360 aa, Homo sapien
MTQQPLRGVTSLRFNQDQSCFCCAMETGVRIYNVEPLMEKGHLDHEQVGSMGLVEMLHRSNLLALVGGGSSPKFSEISVLIWDDAREGKDSKEKLVLEFTFTKPVLSVRMRHDKIVIVLKNRIYVYSFPDNPRKLFEFDTRDNPKGLCDLCPSLEKQLLVFPGHKCGSLQLVDLASTKPGTSSAPFTINAHQSDIACVSLNQPGTVVASASQKGTLIRLFDTQSKEKLVELRRGTDPATLYCINFSHDSSFLCASSDKGTVHIFALKDTRLNRRSALARVGKVGPMIGQYVDSQWSLASFTVPAESACICAFGRNTSKNVNSVIAICVDGTFHKYVFTPDGNCNREAFDVYLDICDDDDF

SEQ ID NO: 634 - DNA, 2277 bp, Homo sapien
acgccctatacaacttggcttcacatacttttacactaactttatatgatttttaaaaactggtctgatcggacttctcgtcctgggacactgtttactggagtctggccggctctccgtgctcctcttggtacctcattttggggagaaccttaaacccactcgagcagataatctccgccttgaccggtgccaccaaagaagggttggaaccatgtggacttttctgggcattgccactttcacctatttttataagaagttcggggacttcatcactttggccaacagggaggtcctgttgtgcgtgctggtgttcctctcgctgggcctggtgctctcctaccgctgtcgccaccgaaacgggggtctcctcgggcgccagcggagcggctcccagttcgccctcttctcggatattctctcaggcctgcctttcattggcttcttctgggccaaatccccccctgaatcagaaaataaggagcagctcggggccaggaggcgcagaaaaggaaccaatatttcagaaacaagcttaataggaacagctgcctgtacatcaacatcttctcagaatgacccagaagttatcatcgtgggagctggcgtgcttggctctgctttggtagctgtgctttccagagatggaagaaaggtgacagtcattgagagagacttaaaagagcctgacagaatagttggagaattcctgcagccgggtggttatcatgttctcaaagaccttggtcttggagatacagtggaaggtcttgatgcccaggttgtaaatggttacatgattcatgatcaggaaagcaaatcagaggttcagattccttaccctctgtcagaaaacaatcaagtgcagagtggaagagctttccatcacggaagattcatcatgagtctccggaaagcagctatggcagagcccaatgcaaagtttattgaaggtgttgtgttacagttattagaggaagatgatgttgtgatgggagttcagtacaaggataaagagactggagatatcaaggaactccatgctccactgactgttgttgcagatgggcttttctccaagttcaggaaaagcctggtctccaataaagtttctgtatcatctcattttgttggctttcttatgaagaatgcaccacagtttaaagcaaatcatgctgaacttattttagctaacccgagtccagttctcatctaccggatttcatccagtgaaactcgagtacttgttgacattagaggagaaatgccaaggaatttaagagaatacatggttgaaaaaatttacccacaaatacctgatcacctgaaagaaccattcttagaagccactgacaattctcatctgaggtccatgctagcaagcttccttcctccttcatcagtgaagaaacgaggtgttcttcttttgggagacgcatataatatgaggcatccacttactggtggaggaatgactgttgcttttaaagatataaaactatggagaaaactgctaaagggtatccctgacctttatgatgatgcagctattttcgaggccaacaaatcattttactgggcaagaaaaacatctcattcctttgtcgtgaatatccttgctcaggctctttatgaattattttctgccacagatgattccctgcatcaactaagaaaagcctgttttctttatttcaaacttggtggcgaatgtgttgcgggtcctgttgggctgctttctgtattgtctcctaaccctctagctttaattggacacttctttgctgttgcaatctatgccgtgtatttttgctttaagtcagaaccttggattacaaaacctcgagcccttctcagtagtagtgctgtattgtacaaagcgtgttctgtaatatttcctctaatttactcagaaatgaagtatatggttcattaagcttaaaggggaaccatttgtgaatgaatatttggaacttaccaagtcctaagagacttttggaagaggatatatatagcatagtaccataccacttataaagtggaaactcttggaccaagatttggattaatttgtttttgaagttttttgtatataaatatgtaaatacatgctttaatttgcaatttaaaatgaaggggttaaataagttagacatttgaaagaaatgattgttaccataaattagtgctaatgctgaggagaactacagtttttcttttgaatttagtatttgagatgagttgttgggacatgcaaataaaatgaagaatgac

SEQ ID NO: 635 - protein, 574 aa, Homo sapien
MWTFLGIATFTYFYKKFGDFITLANREVLLCVLVFLSLGLVLSYRCRHRNGGLLGRQRSGSQFALFSDILSGLPFIGFFWAKSPPESENKEQLGARRRRKGTNISETSLIGTAACTSTSSQNDPEVIIVGAGVLGSALVAVLSRDGRKVTVIERDLKEPDRIVGEFLQPGGYHVLKDLGLGDTVEGLDAQVVNGYMIHDQESKSEVQIPYPLSENNQVQSGRAFHHGRFIMSLRKAAMAEPNAKFIEGVVLQLLEEDDVVMGVQYKDKETGDIKELHAPLTVVADGLFSKFRKSLVSNKVSVSSHFVGFLMKNAPQFKANHAELILANPSPVLIYRISSSETRVLVDIRGEMPRNLREYMVEKIYPQIPDHLKEPFLEATDNSHLRSMLASFLPPSSVKKRGVLLLGDAYNMRHPLTGGGMTVAFKDIKLWRKLLKGIPDLYDDAAIFEANKSFYWARKTSHSFVVNILAQALYELFSATDDSLHQLRKACFLYFKLGGECVAGPVGLLSVLSPNPLALIGHFFAVAIYAVYFCFKSEPWITKPRALLSSSAVLYKACSVIFPLIYSEMKYMVH

SEQ ID NO: 636 - DNA, 2983 bp, Homo sapien
ggcacgagggcgcggcggaggctcccgtggcctcggacgctcctcctagctagcggccgccgcccgccgccgcctgcgcctccagctccttcgccccggcgggcccggccgccgcttccggcagctcacctgggaagcgctcacctgggacgcgctcacctgggacgcgctacctgcctccgggcgcctgggcttcaggatgaaggaccgtctggagcagctgaaggccaagcagctgacacaggatgatgatactgatgcggttgagattgctatcgacaacacggcttttatggacgagttcttttctgagattgaggaaactcggcttaacattgacaagatctcagaacatgtagaggaggctaagaaactctacagtatcattctctctgcaccgattccagagccaaaaaccaaggatgacctagagcagctcacgactgagattaagaaaagggccaacaacgtccggaacaaactgaagagcatggagaagcatattgaagaagatgaggtcaggtcatcggcagaccttcggattcggaaatcccagcactctgtcctttctcggaagtttgtggaggtgatgaccaaatacaatgaagctcaagtggacttccgagaacgcagcaaagggcgaatccagcggcagctcgaaattactggcaaaaagacaaccgatgaggagctggaggagatgttggagagtggcaacccggccatcttcacttctgggatcattgactcacagatttccaagcaagccctcagtgagattgagggacgacacaaggacattgtgaggctggagagcagcatcaaggagcttcacgacatgtttatggacatcgccatgctggtggagaatcagggtgagatgttagataacatagagttgaatgtcatgcacacagtggaccacgtggagaaggcacgagatgaaacgaaaaaagctgtgaaataccagagtcaggcccggaagaaattgataattatcattgtgctagtagttgtgttgctgggcattttagcattgattattggactttccgttgggctgaattaagagtggcctaagaggctgctgcactgaaataaactgatttcactccagactggtgtggccacccttgtcttcagatgagaatggagtctgaatggccttcctgagagcgagtgcgacccgttcctttgtttccttgcaaccacccttggacctgactcagctaacaatctagccctgggggaatgtgatctacctgatgcgaccctgagttctccccagagcctcctcctgccccaccagctctcaagtaccttttctcctggactgtgtggacccacccagctttcttcctccctgttgtgtgtcagattatgccttgcacttgggaaagctcttgtgagactctcccaaggtgctgtatttttctacctcatggagtattctcccagaaactgcaatgtatttttttaggggagtatctttaacaaagcagaatgattcttctaagtttggcaacaagaaggcttggatctgagtcttctacctggcaggatgccaatcctgtttgttgtccgtatgtcctgaaaacatgagggactggcagatgtcattttggtctaaagagctgacttgtttgaaattcagccttaaattaagctcttagttgttcagcttggggggcaactttgatttttctctgtgttgtagtctctcatatttactcaaggagggaccaggatgatacagtcatctgaggttatgctttgcaaaaggctgacggtatggaatatgtttccatgtctgagtcttagaaactggctgctcattgttagaaagtgatgctttgtgagactattgtcttggggccaaaaataatcagggattttaaattgggcaagggacaaggtgctagaatcctaagctctggaaatatttcatgacactggtgtattcactcatgtgttccagatgtattctaattgtgtatgaaatgtatgtacacataagtgtgtgtgtctcaggaagtaggaaataaaaatggaagctattatgacctcaaaaaaaaaaagccaactttgagctaggataaaaattgggtaaaggacatttgcttacctgcaaatgaatcactgtggaaatgtgatcttcccatatcatcaagaaacttgttttctggatgaatactgggagaataaaatgagaactctggagtgagctaaattgatcccaattaagtttttctgcttagcagacagaaggtataattttttgacaccctttcccacctggtgcctatgctaggcttgtcctgagaacatccctcagtaacttgatattcacatgacctacaggatgtcccatctgcagggctgagtcagttggggaacaccagaggctacacagtagctcttcctgctactcggttaatgagcttggcaggttctttgtctcactgaattcttatcatggaaacagcagcagcagccgctaggaaatcttcaagtgtagtgtctgtgctaacccagtggtaaatcccttagatcccctgctggtctctggcagtctccttgattttgggtaccatgtatattttccgctttgactttaacgctttctaggatagggtaagcacccttaattcaggcactgtccattagcttcctttgcaaaggctacttatggccggtcacaatccagcactcagacagagccaaggcaatatcctcttgcccatggctatgatgtcagacagtggatgggctccagcaacaagagacaaaataactaaaggcctttgctctcctctgacattgaggcctggggcttacagtttggaatacaacatgtgaaggtttttgttgttgtttgtattttttagatgtaaacttgattattttattgctaatttaaaaataaaaatgactttgtattgattgtgaaaaaaaaaaaaaaaaaaaaaaaaaaaaaaaaaaa

SEQ ID NO: 637 - protein, 289 aa, Homo sapien
MKDRLEQLKAKQLTQDDDTDAVEIAIDNTAFMDEFFSEIEETRLNIDKISEHVEEAKKLYSIILSAPIPEPKTKDDLEQLTTEIKKRANNVRNKLKSMEKHIEEDEVRSSADLRIRKSQHSVLSRKFVEVMTKYNEAQVDFRERSKGRIQRQLEITGKKTTDEELEEMLESGNPAIFTSGIIDSQISKQALSEIEGRHKDIVRLESSIKELHDMFMDIAMLVENQGEMLDNIELNVMHTVDHVEKARDETKKAVKYQSQARKKLIIIIVLVVVLLGILALIIGLSVGLN

SEQ ID NO: 638 - DNA, 6802 bp, Homo sapien
aataagaaaaagcttttcattttgaaatctagaatacctccacttttgaaaatctttgatttcccaaatttttcttgctatgcactagttaaaagataaggtattatataatgagcaatagcacagatctcaaactgtttgagttgcatatgggccataccttcttttctgtaacgtgcatacccatgcattaacacttgtcgccttttccagatctgctcactttagcactctggcaattaaacagaacccccttctggcagaagcttattcgaatttggggaatgtgtacaaggaaagagggcagttgcaggaggcaattgagcattatcgacatgcattgcgtctcaaacctgatttcatcgatggttatattaacgctgcagccgccttggtagcagcgggtgacatggaaggggcagtacaagcttacgtctctgctcttcagtacaatcctgatttgtactgtgttcgcagtgacctggggaacctgctcaaagccctgggtcgcttggaagaagccaagaaggtttcaggtgggtgaaacctcctattccatgcgtaaggtgcctcgctgaagggagctcgaggcctggatctagggcagacacacaacctcctcctcctcttccagcaaggaacgcaccgaaaagtcacatgatgagaaatatggtaacgggtttgtaactgccacagcaaaacaatttgcctccatgcctgaatcttctgtcttgtggcttcagaaacagcttaaaataattttatttacaagcaagttatgtaagagaatgttttatactatagccacaattctgtcaaagataagtaaaagttaattgatattaaaaattattagagataatttacttagtaaaagcttctaactcttcttgttgttcattttttttccttttttcttctttgtttggattgcagcattctgctcttctgatgatgcgctgtgaccctgcagtagcgcaaaggctgcgcagcgttaatgcgcattgcgtgcgaatgaacccctgtgaacggttgactagatgagtaatctgattgactggctccctcagtcctattctgtagcctttttggataaaattgggttttaacatacctcgagtccaactaatctcattaaacaaatattctccatgggcctgtctagtagattaatggatctggttggccgtttgctgcgtctaggggtgttctatgtagcgcagcagttcgcagcgattgcgcagtgcgatgctgttaggttgcgcaagcgatgtttgcgctcgcattacagggacctcaacctaggtgcaatcctgtcatgtgaggtttcagcttcagtcctccttgggagacggggcattgtgagaatgtaacttaaagcctggctttatgatatcctacttggcagaaagacatttttctcctcagtagcatagttttgatgttagtgaggaacattgttgaagagcagcatttcccaaaatgtgtttcatagtattctaataaaatgcccaatgaaagaagagttccatggtcaactaagttcagggaaccctgttacactattaaaggcttagggaagtccagtaaagaaacctattttccgaatttatttgatcatgaactcctttttttttcagccatacctcttaacacctcatagaacacactttgggaaacagtgggggtaggaaaactcggcctcaagttgcgccctctaggtagcacttgaaaacatgacaagggcccgtagttgtttggataagagaactccagcatagagccttatagcaactgacttcccagttaagtcccagtgtaagggttggtctttggttggcagaactgaacatggtggtttgcacttgggttctggtggcgcaggcgcaggagcagccagctgtggcagcgcattagttttggcgcaagcgagcctatgctgcagggtcacttttggctggtcagagaaggaataatgatatcaccttcttccccccctccccccaatcttttttttttccctttacaaattttcccctttccctttacctcctttccctcccatcttctttcattaacccctcctaaggcatgttatttgaaagcaattgagacgcaaccgaactttgcagtagcttggagtaatcttggctgtgttttcaatgcacaaggggaaatttggcttgcaattcatcactttgaaaaggctgtcacccttgacccaaactttctggatgcttatatcaatttaggaaatgtcttgaaagaggcacgcatttttgacagagctgtggcagcttatcttcgtgccctaagtttgagtccaaatcacgcagtggtgcacggcaacctggcttgtgtatactatgagcaaggcctgatagatctggcaatagacacctacaggcgggctatcgaactacaaccacatttccctgatgcttactgcaacctagccaatgctctcaaagagaagggcagtgttgctgaagcagaagattgttataatacagctctccgtctgtgtcccacccatgcagactctctgaataacctagccaatatcaaacgagaacagggaaacattgaagaggcagttcgcttgtatcgtaaagcattagaagtcttcccagagtttgctgctgcccattcaaatttagcaagtgtactgcagcagcagggaaaactgcaggaagctctgatgcattataaggaggctattcgaatcagtcctacctttgctgatgcctactctaatatgggaaacactctaaaggagatgcaggatgttcagggagccttgcagtgttatacgcgtgccatccaaattaatcctgcatttgcagatgcacatagcaatctggcttccattcataaggattcagggaatattccagaagccatagcttcttaccgcacggctctgaaacttaagcctgattttcctgatgcttattgtaacttggctcattgcctgcagattgtctgtgattggacagactatgatgagcgaatgaagaagttggtcagtattgtggctgaccagttagagaagaataggttgccttctgtgcatcctcatcatagtatgctatatcctctttctcatggcttcaggaaggctattgctgagaggcacggcaacctgtgcttagataagattaatgttcttcataaaccaccatatgaacatccaaaagacttgaagctcagtgatggtcggctgcgtgtaggatatgtgagttccgactttgggaatcatcctacttctcaccttatgcagtctattccaggcatgcacaatcctgataaatttgaggtgttctgttatgccctgagcccagacgatggcacaaacttccgagtgaaggtgatggcagaagccaatcatttcattgatctttctcagattccatgcaatggaaaagcagctgatcgcatccatcaggatggaattcatatccttgtaaatatgaatggctatactaagggcgctcgaaatgagctttttgctctcaggccagctcctattcaggcaatgtggctgggataccctgggacgagtggtgcgcttttcatggattatattatcactgatcaggaaacttcgccagctgaagttgctgagcagtattccgagaaattggcttatatgccccacactttttttattggtgatcatgctaatatgttccctcacctgaagaaaaaagcagtcatcgattttaagtccaatgggcacatttatgacaatcggatagttctgaatggcatcgacctcaaagcatttcttgatagtctaccagatgtgaaaattgtcaagatgaagtgtcctgatggaggagacaatgcagatagcagtaacacagctcttaatatgcctgttattcctatgaatactattgcagaagcagttattgaaatgattaaccgaggacagattcaaataacaattaatggattcagtattagcaatggactggcaactactcagatcaacaataaggctgcaactggagaggaggttccccgtaccattattgtaaccacccgttctcagtacgggttaccagaagatgccatcgtatactgtaactttaatcagttgtataaaattgacccttctactttgcagatgtgggcaaacattctgaagcgtgttcccaatagtgtactctggctgttgcgttttccagcagtaggagaacctaatattcaacagtatgcacaaaacatgggcctgccccagaaccgtatcattttttcacctgttgctcctaaagaggaacacgtcaggagaggccagctggctgatgtctgcttggacactccactctgtaatgggcacaccacagggatggatgtcctctgggcagggacccccatggtgactatgccaggagagactcttgcttctcgagttgcagcatcccagctcacttgcttaggttgtcttgagcttattgctaaaaacagacaagaatatgaagacatagctgtgaagctgggaactgatctagaatacctgaagaaagttcgtggcaaagtctggaagcaaagaatatctagccctctgttcaacaccaaacaatacacaatggaactagagcggctctatctacagatgtgggagcattatgcagctggcaacaaacctgaccacatgattaagcctgttgaagtcactgagtcagcataaataaagactgcacaggagaattacccctatacctgagcctcaaccttctgggggaaagggaactagataacatacttcttacttgtctgtacagtaccttgttgcagatgggtgatatataatggtaatagaatagcacagccagacttgcttcctgcatggtagggagagacacaaaagatgggaaactgcttttccacaaggaatctccgtagaattttgcggcgaccagatggtgcataggtctggaaggtctgatctcccttggtcttccatgggatggttagtgtggaggggagatatagattgtccggccgctttgtgattccatggattgattcagtcttctggatttttttttctttatattttgggtactggagcttttaaaaatgtttggtttcaggtatttttattcatgtgaagtgtatatgattctcttgagataaggttttaagctaaaatgttactccctgttttagtttctgaactctgacagattgacagggactttgctggtgtagtctttttataggttttataaaccacttgagcctatatcagtcgttttagtgtctgacctaatatttggagctatcagtgctttgttgatttagatgatgactcaagattttttctggtccatttcccatttccttttcttccctgacccccataccctcacccttaaaattctcctgtaactcaactaacaaaatcaagcctgattcaaaacatcctagggtgttttaaacacaccatctggtgccaaatgaagatttttaggagtgattactaattatcaagggcacagttgtggtactgtcattgataataatatagtttttttttttttcctaattttgacctgtttcaccagtgttttacccttgactgccccttctatgctgcttccaaaagtgatagtgtgtgtaagatttttaccttcctttctaaagttttttttttttttttttaagtgagtcctgttcttcctatttctttcagcagaaatgaaatcccaggtaagtataagtattcaagtatttgatcagtaagtcacagttatctccagtgcattaaataaccttcatcaagaaataggttataggtaaaatctctgaaggatcatctatgtattcaagtaattattttttagataataactgtcttctggacttggtcttgaagtctgtacagattcagcctcagtagtagcgaactgcactgctgtttggtttggagtacaaattagacttatagtcctcctggaacttgagttattaaaatcataggaataaaattatgggatctcaacaaagggtcgagggtttgaggcttaaacaagccaacatatgaatatatgttttgtctcgctatactgcacttacgctatccagttgcaggtaattttttgtctgctagtagtgttctagattatgtctttccaaagcgctgaggctgtgcacctattctgtagttgcagctgatgcctgaatgtatcctagctgacaaattattgattaataagaacttgaatttctggaagattcttactgttaaccaaattttgagcaaggagtctcaaaggtaattctgaaccagaattacatgttaatgaacagtgtaccttttaacagtgtaaatcacggaatatccgtgaagggatttcttaatttattttttaccggttgattgaaatatcagttaaaggttgccagcatggttgcagataaactgatgtttgaaattcgctgaaatacttaatgtggaataggataatatacttccaatgccctcaaggctgtgaccttacagccattttacatagcacatcattcctcctatagggatgaactttttcctggcacgaaaagtagccgctctggttgaagctttgcttattgtaacaggcttttatttccaggtaatatgtcttggaagacttaattctgattagagatatagatattactggaaactaattgttttttttctattgtactctgctttatcaaagaagtaaaacatttaaatcgtactacagaaattaagatgttgtcttgcgatccttaataaatgaatgatttccctttaaaaaaa

SEQ ID NO: 639 - protein, 907 aa, Homo sapien [sequence omitted]

SEQ ID NO: 640 - DNA, 1350 bp, Homo sapien
atgcgtgagtgcatctccatccacgttggccaggctggtgtccagattggcaatgcctgctgggagctctactgcctggaacacggcatccagcccgatggccagatgccaagtgacaagaccattgggggaggagatgattccttcaacaccttcttcagtgaaacgggtgctggcaagcatgtgccccgggcagtgtttgtagacttggaacccacagtcattgatgaagttcgcactggcacttaccgccagctcttccaccctgagcaactcatcacaggcaaggaagatgctgccaataactatgcccgagggcactacaccattggcaaggagatcattgacctcgtgttggaccgaattcgcaagctggctgaccagtgcaccggtcttcagggcttcttggttttccacagctttggtgggggaactggttctgggttcacctcgctgctcatggaacgtctctcagttgattatggcaagaagtccaagctggagttctccatttacccggcgccccaggtttccacagctgtagttgagccctacaactccatcctcaccacccacaccaccctggagcactctgattgtgccttcatggtagacaatgaggccatctatgacatctgtcgtagaaacctcgatatcgagcgcccaacctacactaaccttaaccgccttattagccagattgtgtcctccatcactgcttccctgagatttgatggagccctgaatgttgacctgacagaattccagaccaacctggtgccctacccccgcatccacttccctctggccacatatgcccctgtcatctctgctgagaaagcctaccatgaacagcttactgtagcagagatcaccaatgcttgctttgagccagccaaccagatggtgaaatgtgaccctcgccatggtaaatacatggcttgctgcctgttataccgtggtgacgtggttcccaaagatgtcaatgctgccattgccaccatcaaaaccaagcgtaccatccagtttgtggattggtgccccactggcttcaaggttggcattaattaccagcctcccactgtggtgcctggcggagacctggccaaggtacagagagctgtgtgcatgctgagcaataccacagctgttgccgaggcctgggctcgcctggaccacaagtttgacctgatgtatgccaagcgtgcctttgttcactggtacgtgggtgaggggatggaggaaggcgagttttcagaggcccgtgaggacatggctgcccttgagaaggattatgaggaggttggagcagatagtgctgacggagaggatgagggtgaagagtattaa

SEQ ID NO: 641 - protein, 449 aa, Homo sapien
MRECISIHVGQAGVQIGNACWELYCLEHGIQPDGQMPSDKTIGGGDDSFNTFFSETGAGKHVPRAVFVDLEPTVIDEVRTGTYRQLFHPEQLITGKEDAANNYARGHYTIGKEIIDLVLDRIRKLADQCTGLQGFLVFHSFGGGTGSGFTSLLMERLSVDYGKKSKLEFSIYPAPQVSTAVVEPYNSILTTHTTLEHSDCAFMVDNEAIYDICRRNLDIERPTYTNLNRLISQIVSSITASLRFDGALNVDLTEFQTNLVPYPRIHFPLATYAPVISAEKAYHEQLTVAEITNACFEPANQMVKCDPRHGKYMACCLLYRGDVVPKDVNAAIATIKTKRTIQFVDWCPTGFKVGINYQPPTVVPGGDLAKVQRAVCMLSNTTAVAEAWARLDHKFDLMYAKRAFVHWYVGEGMEEGEFSEAREDMAALEKDYEEVGADSADGEDEGEEY

SEQ ID NO: 642 - DNA, 3246 bp, Homo sapien
  Unsure 2530: Unknown base
agtgtggttttagtttttcctaagaagtggcgtggtttggggctttatatccgggaggagcatatgtacgcaaatcctggggcgtttgcaaacccggatccggggcgtctggccccatgcccggccgggcgtttgagggctactgccacgcagcgtttctggagcctgccggctggtgccctggtggcctttatctctgtccccctttgtcctctttatctcaggctctccaggaggccggggggcccactccgcctatcgctcccctcggctacgctgccactccaatgccccgcaggtcgcgagctgctgttctttcgaaggcgccggagaaccaggggcgtcccgcgccacctctgactcggagcagcgccgagcactgacgctcccgcccttgggcaaggacgccagtgcgcccgcgcgcgtccctctgcgcggcagcccgtcgcgggccctcaaggggaagcccaggccaggatggccccgggtcgcgcggtggccgggctcctgttgctggcggccgccggcctcggaggagtggcggaggggccagggctagccttcagcgaggatgtgctgagcgtgttcggcgcgaatctgagcctgtcggcggcgcagctccagcacttgctggagcagatgggagccgcctcccgcgtgggcgtcccggagcctggccagctgcacttcaaccagtgtttaactgctgaagagatcttttcccttcatggcttttcaaatgctacccaaataaccagctccaaattctctgtcatctgtccagcagtcttacagcaattgaactttcacccatgtgaggatcggcccaagcacaaaacaagaccaagtcattcagaagtttggggatatggattcctgtcagtgacgattattaatctggcatctctcctcggattgattttgactccactgataaagaaatcttatttcccaaagattttgaccttttttgtggggctggctattgggactcttttttcaaatgcaattttccaacttattccagaggcatttggatttgatcccaaagtcgacagttatgttgagaaggcagttgctgtgtttggtggattttacctacttttcttttttgaaagaatgctaaagatgttattaaagacatatggtcagaatggtcatacccactttggaaatgataactttggtcctcaagaaaaaactcatcaacctaaagcattacctgccatcaatggtgtgacatgctatgcaaatcctgctgtcacagaagctaatggacatatccattttgataatgtcagtgtggtatctctacaggatggaaaaaaagagccaagttcatgtacctgtttgaaggggcccaaactgtcagaaatagggacgattgcctggatgataacgctctgcgatgccctccacaatttcatcgatggcctggcgattggggcttcctgcaccttgtctctccttcagggactcagtacttccatagcaatcctatgtgaggagtttccccacgagttaggagactttgtgatcctactcaatgcagggatgagcactcgacaagccttgctattcaacttcctttctgcatgttcctgctatgttgggctagcttttggcattttggtgggcaacaatttcgctccaaatattatatttgcacttgctggaggcatgttcctctatatttctctggcagatatgtttccagagatgaatgatatgctgagagaaaaggtaactggaagaaaaaccgatttcaccttcttcatgattcagaatgctggaatgttaactggattcacagccattctactcattaccttgtatgcaggagaaatcgaattggagtaatagaaaatggaagatggtgttgttaataaaggcatttaatagataaaaacatctccaaaaaggattttgaagctgatcctatttagttaaaaagataattttgctttcaactgtaggtccagaaaactaattattggcatcagtctgtgaaatagtccattatttgttgttaaaaatgcttcaaaaggttttcagtgtcagtctgagatgcctggtatataggagcctttgggaaatacttatttttcagtattccatgcatattagatatcaccatgaagcaagagacatgcattctataatcatgtagacactcagactcaggggaaaatacaagttatatcctgaaagcctttaaaactctatggtaggatcaaagattcaaatggtttcagagaggttttatttcaattaatttgttctagtgctttcaagagcaagtacatcaaaatgtagaaggtaaaatgtatgcaacactaatataaattattccaagtctttaaggagccaaagaaaaaaaagatttctcacagctttttgttctgttttgtatttcaattaggaacttgcagtattattttgaaaaccattctaaaataataggagttaggaaataaataaagttttgctagccctgctaagttcaggcttagaggcttatcgctaagtntaaacttcaccagattccacgaaaagctggatagctttttttctgacttatgttgtggttgcacccctcacaaatggcagaacagtatgtaaagctggtaacacctcggtttcagtgcaccatgtgtttgctttgtgaaggtgaagaatatgttggtttagagaaagaaattggatgtaattttatgcaatttacttttaaagacaaacataactatttagcagagaatattttaataaatgcaaaacaacagctggactgctgtacatcaaggacagattaactggaaaacatatgttccttatgtgtgattgagagccattcagaaaagacttcctttgtgttcagcctatacttttccatatggtataccttgaaaaaaattagcacaccatggttatttttctaccttttataaaagacagagcctgtttactcatttagaagatagagaaaattggtctaaaattgaacatcctagattcacactcccaagtcacttaaggtgatttgatggtgaggaaaatgattgacaaagcccaacaatgatctcaggaattacattttccaacagaccaaaaaatgttttcatgtagcagcaatgcagatttggtgaatatttaatatatattttagtatgtatttcactttatgactgacaattaaaaaatattgtttggccaaatagtaaacacccttttgaaaccatgaaaaaa

SEQ ID NO: 643 - protein, 460 aa, Homo sapien
MAPGRAVAGLLLLAAAGLGGVAEGPGLAFSEDVLSVFGANLSLSAAQLQHLLEQMGAASRVGVPEPGQLHFNQCLTAEEIFSLHGFSNATQITSSKFSVICPAVLQQLNFHPCEDRPKHKTRPSHSEVWGYGFLSVTIINLASLLGLILTPLIKKSYFPKILTFFVGLAIGTLFSNAIFQLIPEAFGFDPKVDSYVEKAVAVFGGFYLLFFFERMLKMLLKTYGQNGHTHFGNDNFGPQEKTHQPKALPAINGVTCYANPAVTEANGHIHFDNVSVVSLQDGKKEPSSCTCLKGPKLSEIGTIAWMITLCDALHNFIDGLAIGASCTLSLLQGLSTSIAILCEEFPHELGDFVILLNAGMSTRQALLFNFLSACSCYVGLAFGILVGNNFAPNIIFALAGGMFLYISLADMFPEMNDMLREKVTGRKTDFTFFMIQNAGMLTGFTAILLITLYAGEIELE

SEQ ID NO: 644 - DNA, 2383 bp, Homo sapien
ggggctaccgcgcctttgcttcctggcgcacgcggagcctcctggagcctgccaccatcctgcctactacgtgctgccctgcgcccgcagccatgtgccgcaccctggccgccttccccaccacctgcctggagagagccaaagagttcaagacacgtctggggatctttcttcacaaatcagagctgggctgcgatactgggagtactggcaagtccgagtggggcagtaaacacagcaaagagaatagaaacttctcagaagatgtgctggggtggagagagtcgttcgacctgctgctgagcagtaaaaatggagtggctgccttccacgctttcctgaagacagagttcagtgaggagaacctggagttctggctggcctgtgaggagttcaagaagatccgatcagctaccaagctggcctccagggcacaccagatctttgaggagttcatttgcagtgaggcccctaaagaggtcaacattgaccatgagacccgcgagctgacgaggatgaacctgcagactgccacagccacatgctttgatgcggctcaggggaagacacgtaccctgatggagaaggactcctacccacgcttcctgaagtcgcctgcttaccgggacctggctgcccaagcctcagccgcctctgccactctgtccagctgcagcctggacgagccctcacacacctgagtctccacggcagtgaggaagccagccgggaagagaggttgagtcacccatccccgaggtggctgcccctgtgtgggaggcaggttctgcaaagcaagtgcaagaggacaaaaaaaaaaaaaaaaaaaaaaaaaatgcgctccagcagcctgtttgggaagcagcagtctctccttcagatactgtgggactcatgctggagaggagccgcccacttccaggacctgtgaataagggctaatgatgagggttggtggggctctctgtggggcaaaaaggtggtatgggggttagcactggctctcgttctcaccggagaaggaagtgttctagtgtggtttaggaaacatgtggataaagggaaccatgaaaatgagaggaggaaagacatccagatcagctgttttgcctgttgctcagttgactctgattgcatcctgttttcctaattcccagactgttctgggcacggaagggaccctggatgtggagtcttcccctttggccctcctcactggcctctgggctagcccagagtcccttagcttgtacctcgtaacactcctgtgtgtctgtccagccttgcagtcatgtcaaggccagcaagctgatgtgactcttgccccatgcgagatatttatacctcaaacactggcctgtgagccctttccaagtcagtggagagccctgaaaggaggctcacttgaatccagctcagtgctctgggtggccccctgcaggtggcccctgaccctgcgttgcagcagggtccacctgtgagcaggcccgccctggggcctcttcctggatgtgccctctctgagttctgtgctgtctcttggaggcagggcccaggagaacaaagtgtggaggcctcggggagtggcttttccagctctcatgccccgcagtgtggaacaaggcagaaaaggatcctaggaaataagtctcttggcggtccctgagagtcctgctgaaatccagccagtgttttttgtggtatgagaacaggcaaaaagagatgccccgagatagaaggggagccttgtgtttctttcctgcagacgtgagatgaacactggagtgggcagaggtggcmcaggaccatggcacccttagagtgcagaagctggggggagaggctgcttcgaagggcaggactggggatacctgcctgtcacctcagggcatcactgaacaaacatttcctgatggsaactcctgcggcagagcccaggctggggaagtgaactacccagggcagcccctttgtggcccaggataatcaacactgttctctctgtaccatgagctcctccaggagattatttaagtgtattgtatcattggttttctgtgattgtcataacattgtttttgttattgttggtgctgttgttatttattattgtaatttcagtttgcctctactggagaatctcagcaggggtttcagcctgactgtctccctttctctaccagactctacctctgaatgtgctgggaacctcttggagcctgtcaggaactcctcactgtttaaatatttatttattgtgacaaatggagctggtttcctagatatgaatgatgtttgcaatccccattttcctgtttcagcatgttatattcttataaaataaaagcaaaagtcaaatatgaaaaaaaaaaaaaaaaaaaaa

SEQ ID NO: 645 - protein, 202 aa, Homo sapien [sequence omitted]

SEQ ID NO: 646 - DNA, 2383 bp, Homo sapien; identical to SEQ ID NO: 644

SEQ ID NO: 647 - protein, 202 aa, Homo sapien [sequence omitted]

SEQ ID NO: 648 - DNA, 2049 bp, Homo sapien
gagcccagccgagcgtccgccgctgcccgtgcgcctctgcgctccgcgccatggccggcctcaactccctggaggcggtgaaacgcaagatccaggccctgcagcagcaggcggacgaggcggaagaccgcgcgcagggcctgcagcgggagctggacggcgagcgcgagcggcgcgagaaagctgaaggtgatgtggccgccctcaaccgacgcatccagctcgttgaggaggagttggacagggctcaggaacgactggccacggccctgcagaagctggaggaggcagaaaaagctgcagatgagagtgagagaggaatgaaggtgatagaaaaccgggccatgaaggatgaggagaagatggagattcaggagatgcagctcaaagaggccaagcacattgcggaagaggctgaccgcaaatacgaggaggtagctcgtaagctggtcatcctggagggtgagctggagagggcagaggagcgtgcggaggtgtctgaactaaaatgtggtgacctggaagaagaactcaagaatgttactaacaatctgaaatctctggaggctgcatctgaaaagtattctgaaaaggaggacaaatatgaagaagaaattaaacttctgtctgacaaactgaaagaggctgagacccgtgctgaatttgcagagagaacggttgcaaaactggaaaagacaattgatgacctggaagagaaacttgcccaggccaaagaagagaacgtgggcttacatcagacactggatcagacactaaacgaacttaactgtatataagcaaaacagaagagtcttgttccaacagaaactctggagctccgtgggtctttctcttctcttgtaagaagttccttttgttattgccatcttcgctttgctggaaatgtcaagcaaattatgaatacatgaccaaatattttgtatcggagaagctttgagcaccagttaaatctcattccttccctttttttttcaaatggcaccagctttttcagctctcttattttttccttaagtagcatttattcctaaggtaggcagggtatttcctagtaagcatactttcttaagacggaggccatttggttcctgggagaataggcagccccacactttgaagaatacagaccccagtatctagtcgtggatataattaaaacgctgaagaccataaccttttgggtcaactgttggtcaaactataggagagaccagggaccatcacatgggtagggattttccatccagagccaataaaaggactggtgggggccgggggtggctattgtgggaagtcataacccacagatagatcaacctaagaatcctggcccttctccactctccaccatgcaggacaaacatcttctcaagcagtcaacgtagaatgcttgggaaatagtcataattacccacatatagtaattaatagatggtaattaattgatccttgatgtgatgttcttttgcatatttccttcattctaaagttgttccctggccgggagcgtttgctttcgcctgtaatcccaacactttgggaggccaggacagatcacttgaggtcaggagttcgagaccagcccagccaacatggcgaaaccatgtctctactaaaaatacaaaaattatggtgacgcctgcctgtagtcccagctactcgggaggctgaggcaggaggatcgcttgaacccaggaagtggagactgcagtgagccgatatcgcaccacagcgctccagcctggtcgacagagtgagactccatctcaagaaaaaataaaaataaagttgttctctgaagagcaaatgtctcattccagtaatgacccactcagcaggaatatggtggagttcagtccaattcaggtcagccatatccaaaagaccacaagtcattactaagttgagcaaaagagtttttatctattagcagaaagggcctctctggcagcagagattaaaaactggcccaacttcatttccatacttcagggaacagcaaattgaggatttacttatctaggactt

SEQ ID NO: 649 - protein, 248 aa, Homo sapien
MAGLNSLEAVKRKIQALQQQADEAEDRAQGLQRELDGERERREKAEGDVAALNRRIQLVEEELDRAQERLATALQKLEEAEKAADESERGMKVIENRAMKDEEKMEIQEMQLKEAKHIAEEADRKYEEVARKLVILEGELERAEERAEVSELKCGDLEEELKNVTNNLKSLEAASEKYSEKEDKYEEEIKLLSDKLKEAETRAEFAERTVAKLEKTIDDLEEKLAQAKEENVGLHQTLDQTLNELNCI

SEQ ID NO: 650 - DNA, 1919 bp, Homo sapien
gtcctgccgagctgtgagggcaacggaggggaaataaaagggaacggctccgaatctgccccagcggccgctgcgagacctcggcgccgacatcgcgacagcgaagcgctttgcacgccaggaaggtcccctctatgtgctgctgagccggtcctggacgcgacgagcccgccctcggtcttcggagcagaaatcgcaaaaacggaaggactggaaatggcagaccatatgatggccatgaaccacgggcgcttccccgacggcaccaatgggctgcaccatcaccctgcccaccgcatgggcatggggcagttcccgagcccccatcaccaccagcagcagcagccccagcacgccttcaacgccctaatgggcgagcacatacactacggcgcgggcaacatgaatgccacgagcggcatcaggcatgcgatggggccggggactgtgaacggagggcaccccccgagcgcgctggcccccgcggccaggtttaacaactcccagttcatgggtcccccggtggccagccagggaggctccctgccggccagcatgcagctgcagaagctcaacaaccagtatttcaaccatcacccctacccccacaaccactacatgccggatttgcaccctgctgcaggccaccagatgaacgggacaaaccagcacttccgagattgcaaccccaagcacagcggcggcagcagcacccccggcggctcgggcggcagcagcacccccggcggctctggcagcagctcgggcggcggcgcgggcagcagcaacagcggcggcggcagcggcagcggcaacatgcccgcctccgtggcccacgtccccgctgcaatgctgccgcccaatgtcatagacactgatttcatcgacgaggaagttcttatgtccttggtgatagaaatgggtttggaccgcatcaaggagctgcccgaactctggctggggcaaaacgagtttgattttatgacggacttcgtgtgcaaacagcagcccagcagagtgagctgttgactcgatcgaaaccccggcgaaagaaatcaaacccccaacttcttcggcgtgaattaaaagaaacattcccttagacacagtatctcacttttcagatcttgaaaggtttgagaacttggaaacaaagtaaactataaacttgtacaaattggttttaaaaaaaattgctgccacttttttttcctgtttttgtttcgtttttgtagccttgacattcacccacctcccttatgtagttgaaatatctagctaacttggtctttttcgttgtttgtttttactcctttccctcactttctccagtgctcaactgttagatattaatcttggcaaactgcttaatcttgtggattttgtagatggtttcaaatgactgaactgcattcagatttacgagtgaaaggaaaaattgcattagttggttgcatgaactttgaagggcagatattactgcacaaactgccatctcgcttcatttttttaactatgcatttgagtacagactaatttttaaaatatgctaaactggaagattaaacagatgtggcccaaactgttctggatcaggaaagtcatactgttcactttcaagttggctgtcccccccgccgcccccccccacccccatatgtacagatgataatagggtgtggaatgtcgtcagtggcaaacatttcacagattattttgtttctgtcttcaacatttttgacactgtgctaatagttatattcagtacatgaaaagatactactgtgttgaaagccttttaggaaattttgacagtatttttgtacaaaacatttttttgaaaaaatacttgttaatttattctattttaatttgccaatgtcaataaaaagttaagaaataaaaaaaaaaaaaaaaaa

SEQ ID NO: 651 - protein, 270 aa, Homo sapien; identical to SEQ ID NO: 553

SEQ ID NO: 652 - DNA, 2473 bp, Homo sapien
aatcgcgaaacccggcgagcggcgcgctggctatcgagcgagcggggcggaaccgggagttgcgccgccgctcgggcgccgggctccgtcgcggccgcagccccgcgggtcgccctcccgtgcctcgcccgcggacaccctggccgtggacaccctggccgtgggcacccgcggggcgcggcgcgggcgctgcgcggcggcggcggcggcatgaaggtcacgtcgctcgacgggcgccagctgcgcaagatgctccgcaaggaggcggcggcgcgctgcgtggtgctcgactgccggccctatctggccttcgctgcctcgaacgtgcgcggctcgctcaacgtcaacctcaactcggtggtgctgcggcgggcccggggcggcgcggtgtcggcgcgctacgtgctgcccgacgaggcggcgcgcgcgcggctcctgcaggagggcggcggcggcgtcgcggccgtggtggtgctggaccagggcagccgccactggcagaagctgcgagaggagagcgccgcgcgtgtcgtcctcacctcgctactcgcttgcctacccgccggcccgcgggtctacttcctcaaagggggatatgagactttctactcggaatatcctgagtgttgcgtggatgtaaaacccatttcacaagagaagattgagagtgagagagccctcatcagccagtgtggaaaaccagtggtaaatgtcagctacaggccagcttatgaccagggtggcccagttgaaatccttcccttcctctaccttggaagtgcctaccatgcatccaagtgcgagttcctcgccaacttgcacatcacagccctgctgaatgtctcccgacggacctccgaggcctgcatgacccacctacactacaaatggatccctgtggaagacagccacacggctgacattagctcccactttcaagaagcaatagacttcattgactgtgtcagggaaaagggaggcaaggtcctggtccactgtgaggctgggatctcccgttcacccaccatctgcatggcttaccttatgaagaccaagcagttccgcctgaaggaggccttcgattacatcaagcagaggaggagcatggtctcgcccaactttggcttcatgggccagctcctgcagtacgaatctgagatcctgccctccacgcccaacccccagcctccctcctgccaaggggaggcagcaggctcttcactgataggccatttgcagacactgagccctgacatgcagggtgcctactgcacattccctgcctcggtgctggcaccggtgcctacccactcaacagtctcagagctcagcagaagccctgtggcaacggccacatcctgctaaaactgggatggaggaatcggcccagccccaagagcaactgtgatttttgtttttaagactcatggacatttcatacctgtgcaatactgaagacctcattctgtcatgctgccccagtgagatagtgagtggtcaccaggcttgcaaatgaacttcagacggacctcagggtaggttctcgggactgaaggaaggccaagccattacgggagcacagcatgtgctgactactgtacttccagacccctgccctcttgggactgcccagtccttgcacctcagagttcgccttttcatttcaagcataagccaataaatacctgcagcaacgtgggagaaagaagttgctggaccaggagaaaaggcagttatgaagccaattcattttgaaggaagcacaatttccaccttattttttgaactttggcagtttcaatgtctgtctctgttgcttcggggcataagctgatcaccgtctagttgggaaagtcaccctacagggtttgtagggacatgatcagcatcctgatttgaaccctgaaatgttgtgtagacaccctcttgggtccaatgaggtagttggttgaagtagcaagatgttggcttttctggattttttttgccatgggttcttcactgaccttggactttggcatgattcttagtcatacttgaacttgtctcattccacctcttctcagagcaactcttcctttgggaaaagagttcttcagatcatagaccaaaaaagtcataccttcgaggtggtagcagtagattccaggaggagaagggtacttgctaggtatcctgggtcagtggcggtgcaaactggtttcctcagctgcctgtccttctgtgtgcttatgtctcttgtgacaattgttttcctccctgcccctggaggttgtcttcaactgtggacttctgggatttgcagattttgcaacgtggtactacttttttttctttttgtctgttagttatttctccaggggaaaaggcaataattttctaagacccgtgtgaatgtgaagaaaagcagtatgttactggttgttgttgttgttcttgttttttatatgtaaaataaaaatagtgaaaggag

SEQ ID NO: 653 - protein, 384 aa, Homo sapien
MKVTSLDGRQLRKMLRKEAAARCVVLDCRPYLAFAASNVRGSLNVNLNSVVLRRARGGAVSARYVLPDEAARARLLQEGGGGVAAVVVLDQGSRHWQKLREESAARVVLTSLLACLPAGPRVYFLKGGYETFYSEYPECCVDVKPISQEKIESERALISQCGKPVVNVSYRPAYDQGGPVEILPFLYLGSAYHASKCEFLANLHITALLNVSRRTSEACMTHLHYKWIPVEDSHTADISSHFQEAIDFIDCVREKGGKVLVHCEAGISRSPTICMAYLMKTKQFRLKEAFDYIKQRRSMVSPNFGFMGQLLQYESEILPSTPNPQPPSCQGEAAGSSLIGHLQTLSPDMQGAYCTFPASVLAPVPTHSTVSELSRSPVATATSC

SEQ ID NO: 654 - DNA, 1622 bp, Homo sapien
ggcacgaggaagctactcagataagaggctccaagaggacatttttggatgtgaaaaacaatgagaaggaggacaacacacatttacaatcgtcttaattttgtactcagaaaaaggatgtgaagacaatgcacagggaatacaatagtttcagatctgtgtacagtttccttttgcttcatctcctgcaacaatgtaatgaagacaccatgatatcattaacatttcacacaaaaggaaaatgaggctgaaatggtgtgggcaaggcccaggaatctggagcatccctaaccaagcagcagagcacctgggatagagaaagtgctcaagaatgttcacttactgattactacaatcaaaaaaagatacgacactaatttaccacattcttcttacttattttatgagatactattcttccaaggtggagaaagtggagaaagtagagtgacgcagctaagggagtaaatcgaccctcagccaacaagtggcaaaagcctgaagaaagtgatcaagatcactgatgaccccgcggcccatctccaagggggcgggtatcacaaccccgacgccacaccacgtatcattccgcaaaactcccgcgcctcccacgcagaactggcaagagggaaggcgagacagcagtgaacagctggtacgcagcacccacagcaccgcggcagcagctagtgccgactcccgcctagctcttttgactctgttcgcgggaagaatggggaaacagtaaggttgcggcgcctcccgcgagacgaggtacctgaggctggccccgcagtcccccgccgcaccagcaccggagcttcacaccccacttccggggtcaagtcaccgccgggaatcctgtgatcgcagaaaggtagtctcaggttccgcccctatccaagtcccgcctccactgcctctcgccctgtatctgtcaacttccgggacgccgcgcgtcactaagcagccaatctccacttccggactcatccagccccttctccacccctttcagagacagcgcgattgcgatttaggtttccgcgcatttaattggcgaagctggagcgctagtcttcgctgattggtgccgagaaatctgccccatagacacccgcggggcgcacagtttcagtcgtccgtgggtttcccgccagccgcagtcttggaccataatcatggtggacatgatggacttgcccaggtcgcgcatcaacgccggcatgctagctcaattcatcgacaagcctgtctgcttcgtagggaggctggaaaagattcatcccaccggaaaaatgtttattctttcagatggagaaggaaaaaatggaaccatcgagttgatggaaccccttgatgaagaaatctctggaattgtggaagtggttggaagagtaaccgccaaggccaccatcttgtgtacatcttatgtccagtttaaagaagatagccatccttttgatcttggactttacaatgaagctgtgaaaattatccatgacttccctcagttttatcctttagggattgtgcaacatgattgatcttgatggattttcatacgattgtaaatgagctatattaaagtctattaaaggaaaaaaaaaaaaaaaaaaaaa

SEQ ID NO: 655 - protein, 121 aa, Homo sapien
MVDMMDLPRSRINAGMLAQFIDKPVCFVGRLEKIHPTGKMFILSDGEGKNGTIELMEPLDEEISGIVEVVGRVTAKATILCTSYVQFKEDSHPFDLGLYNEAVKIIHDFPQFYPLGIVQHD

SEQ ID NO: 656 - DNA, 1973 bp, Homo sapien
agccgccgcctcgccgcttcccctcgtcggagcggccgctcgtccgcccggcttgaggcccgcggggagcgcggcgcaattcgtcggcccgcgggggggcggcctcccggcatcttcgcggcgaccaaggactaccaggaaggggagcggctgggatggcgcgtccgcggccccgcgagtacaaagcgggcgacctggtcttcgccaagatgaagggctacccgcactggccggcccggattgatgaactcccagagggcgctgtgaagcctccagcaaacaagtatcctatcttcttttttggcacccatgaaactgcatttctaggtcccaaagacctttttccatataaggagtacaaagacaagtttggaaagtcaaacaaacggaaaggatttaacgaaggattgtgggaaatagaaaataacccaggagtaaagtttactggctaccaggcaattcagcaacagagctcttcagaaactgagggagaaggtggaaatactgcagatgcaagcagtgaggaagaaggtgatagagtagaagaagatggaaaaggcaaaagaaagaatgaaaaagcaggctcaaaacggaaaaagtcatatacttcaaagaaatcctctaaacagtcccggaaatctccaggagatgaagatgacaaagactgcaaagaagaggaaaacaaaagcagctctgagggtggagatgcgggcaacgacacaagaaacacaacttcagacttgcagaaaaccagtgaagggacctaactaccataatgaatgctgcatattaagagaaaccacaagaaggttatatgtttggttgtctaatattcttggatttgatatgaaccaacacatagtccttgttgtcattgacagaaccccagtttgtatgtacattattcatattcctctctgttgtgtttcggggggaaaagacattttagccttttttaaaagttactgatttaatttcatgttatttggttgcatgaagttgcccttaaccactaaggattatcaagatttttgcgcagacttatacatgtctaggatccttttatcaaggcagttatgatcatcgttttcctgccttgaccccaccatcatcaaacactcagttaaatataaattaacattttttagatgaccactcaacataatgcttaagaatggaatttcctctctgtgacagaacccaggaattaattcctaaatacataacgttggtatattgaagacgaaattaaaattgtccttcagttttgaggccatgtgtaaagtttaaccatattgtaaaatatctattccgtattagaaatagctagttgacagcttatacttctcaaaattcatattgttatgtacacaaactaagtttctatatgtgaagttagtgagtctttttgtgttactccaaaataaaggcaatgatttatttttttcccagtgccaatacaattttgagctaagcactcaaggtggatactttacattttaaagctggaatcagcaacagccctatgggaaaccagacaaagcattgacttttaaatgtagacttttaaaataaactgttttcttttggaactacaattagaatagttaatattcatccttaaaccattattatgtgtacattattgttgctattgtgataatagagaattttatttatttttatgccagcttatattgtgagaacacatttagtcagtttgggttttatcaatcctgttaatgcttgtccttggaacatctttcgcgtattcacggtttgtagttgaaaagtttactgtaaaaaaatcaaaaacaaaaaaatgtattgtttttacagaataaatttattgggatgtgtactgggagtaagatttgaggttgtaagcaaactaagttagtgtaatttggcttcatatatgtaacgtgaggtattaatgtaattcatatattaaagcaaaaattgttcgcagc

SEQ ID NO: 657 - protein, 203 aa, Homo sapien
MARPRPREYKAGDLVFAKMKGYPHWPARIDELPEGAVKPPANKYPIFFFGTHETAFLGPKDLFPYKEYKDKFGKSNKRKGFNEGLWEIENNPGVKFTGYQAIQQQSSSETEGEGGNTADASSEEEGDRVEEDGKGKRKNEKAGSKRKKSYTSKKSSKQSRKSPGDEDDKDCKEEENKSSSEGGDAGNDTRNTTSDLQKTSEGT

SEQ ID NO: 658 - DNA, 1973 bp, Homo sapien; identical to SEQ ID NO: 656

SEQ ID NO: 659 - protein, 203 aa, Homo sapien; identical to SEQ ID NO: 657

SEQ ID NO: 660 - DNA, 3741 bp, Homo sapien
ccgttcacgcgttcggtcctccttggctgactcaccgccctcgccgccgcaccatggacgcccccaggcaggtggtcaactttgggcctggtcccgccaagctgccgcactcagtgttgttagagatacaaaaggaattattagactacaaaggagttggcattagtgttcttgaaatgagtcacaggtcatcagattttgccaagattattaacaatacagagaatcttgtgcgggaattgctagctgttccagacaactataaggtgatttttctgcaaggaggtgggtgcggccagttcagtgctgtccccttaaacctcattggcttgaaagcaggaaggtgtgctgactatgtggtgacaggagcttggtcagctaaggccgcagaagaagccaagaagtttgggactataaatatcgttcaccctaaacttgggagttatacaaaaattccagatccaagcacctggaacctcaacccagatgcctcctacgtgtattattgcgcaaatgagacggtgcatggtgtggagtttgactttatacccgatgtcaagggagcagtactggtttgtgacatgtcctcaaacttcctgtccaagccagtggatgtttccaagtttggtgtgatttttgctggtgcccagaagaatgttggctctgctggggtcaccgtggtgattgtccgtgatgacctgctggggtttgccctccgagagtgcccctcggtcctggaatacaaggtgcaggctggaaacagctccttgtacaacacgcctccatgtttcagcatctacgtcatgggcttggttctggagtggattaaaaacaatggaggtgccgcggccatggagaagcttagctccatcaaatctcaaacaatttatgagattattgataattctcaaggattctacgtttgtccagtggagccccaaaatagaagcaagatgaatattccattccgcattggcaatgccaaaggagatgatgctttagaaaaaagatttcttgataaagctcttgaactcaatatgttgtccttgaaagggcataggtctgtgggaggcatccgggcctctctgtataatgctgtcacaattgaagacgttcagaagctggccgccttcatgaaaaaatttttggagatgcatcagctatgaacacatcctaaccaggatatactctgttcttgaacaacatacaaagtttaaagtaacttggggatggctacaaaaagttaacacagtatttttctcaaatgaacatgtttattgcagattcttcttttttgaaagaacaacagcaaaacatccacaactctgtaaagctggtgggacctaatgtcaccttaattctgacttgaactggaagcattttaagaaatcttgttgcttttctaacaaattcccgcgtattttgcctttgctgctactttttctagttagatttcaaacttgcctgtggacttaataatgcaagttgcgattaattatttctggagtcatgggaacacacagcacagagggtaggggggccctctaggtgctgaatctacacatctgtggggtctcctgggttcagtggctgttgattcaaggtcaacattgaccattggaggagtggtttaagagtgccaggcgaagggcaaactgtagatcgatctttatgctgttattacaggagaagtgacatactttatatatgtttatattagcaaggtctgtttttaataccatatactttatatttctatacatttatatttctaataatacagttatcactgatatatgtagacacttttagaatttattaaatccttgaccttgtgcattatagcattccattagcaagagttgtaccccctccccagtcttcgccttcctctttttaagctgttttatgaaaaagacctagaagttcttgattcatttttaccattctttccataggtagaagagaaagttgattggttggttgtttttcaattatgccattaaactaaacatttctgttaaattaccctatcctttgttctctactgttttctttgtaatgtatgactacgagagtgatactttgctgaaaagtctttcccctattgtttatctattgtcagtattttatgttgaatatgtaaagaacattaaagtcctaaacacggttctaagctaagtgaaggggaagatctgagagcgtgctgtttgtggctgttgatgcatattcgtgatgtaacaggtcctggggcctcactttaccccatttgtaaaatggggctaatgtcacctgcctcttacctacctcagagggatttggtgaagcaaactgttaatcttcgaaaacgaccatttcacttcttggatatcaagtgctaacccagtatgttcttcttttttatgtaagggacagctttctccacagagtcctttctgctggtgaggacagcatttctgagcagggctttgttctctatgtgcattaggacttttatcatgcccttgttctgtgtgtagttacttgacagcatcaaatgccgcctcttcctaatgtccttcaagttttcatgaactagcaaccccaccttccaccatggttctgggcgcctgattttgctgtgactcccagacccagccactgtttctgccaccctgtaacaggccattaaagctccccagtgttcagcctccttcactcccttgttttccctgttgctatgtgtcacctgggccctacagacaggggcacacgcttatggatgtgtgtaccattgagatgagaatgggtagatggaacggagaccatcaagccacacccccttcttaaaactggggacatgagcctgagcagaaagggtgaagaagagccatgggacacagagttgacccagccagggggaaagcccagctctctttaaaccagctaagccattccagtctcctgtgaagccaaaagggaccaggaaccgtgcaaaggaaactggaaacttttccccgctgggtagagcatgttgctgatactcttctgttttcaagggaaacaatcacattgtttgattccaaatggtaaatgaacactcactattcttcaggcttcagtaaatctttttttcttccttcatatatatatacacaacacacacacacatatgtatatctatacacacatgtgtgttgtgtatatgcatgtgtgtgtgtgcgtgtgtgtatagttttagctccaagccaagcaagtttgtgtttggatagaggggaacttaactattaactacaagttgtatgtctgtggtatcttgattttcccatttctaaagatgaatttcacaaagccataaagcgtgaaattagagctggacttaagactcattggccgaccatcctgtgtcctggcctggccctgcagtaagaagcgtgtctgggtctggagaagggtgcttccgagagtgtgcaggtggcccttccccttggaggcgagaagagagaatgtgctgtctatcttcctggttttcagtccacagagtcggtagaccaggggttacgtgactggggaaaatctcacatctccttgtctgaaaacatttcccctgctgttctctttctaacatgttgtggtaaatctgttcagatactgctcatctgactgttttgtacatgtgacaattgccttaaaacctagcacagtcctcagaaatgaataccgtgtttccactggaaaaaaaaaaaaaaaaaaaaaaaaaaa

SEQ ID NO: 661 - protein, 370 aa, Homo sapien
MDAPRQVVNFGPGPAKLPHSVLLEIQKELLDYKGVGISVLEMSHRSSDFAKIINNTENLVRELLAVPDNYKVIFLQGGGCGQFSAVPLNLIGLKAGRCADYVVTGAWSAKAAEEAKKFGTINIVHPKLGSYTKIPDPSTWNLNPDASYVYYCANETVHGVEFDFIPDVKGAVLVCDMSSNFLSKPVDVSKFGVIFAGAQKNVGSAGVTVVIVRDDLLGFALRECPSVLEYKVQAGNSSLYNTPPCFSIYVMGLVLEWIKNNGGAAAMEKLSSIKSQTIYEIIDNSQGFYVCPVEPQNRSKMNIPFRIGNAKGDDALEKRFLDKALELNMLSLKGHRSVGGIRASLYNAVTIEDVQKLAAFMKKFLEMHQL

SEQ ID NO: 662 - DNA, 3001 bp, Homo sapien
actttcctgccccttccccggccaagcccaactccggatctcgctctccaccggatctcacccgccacacccggacaggcggctggaggaggcgggcgtctaaaattctgggaagcagaacctggccggagccactagacagagccgggcctagcccagagacatggagagttgctacaacccaggtctggatggtattattgaatatgatgatttcaaattgaactcctccattgtggaacccaaggagccagccccagaaacagctgatggcccctacctggtgatcgtggaacagcctaagcagagaggcttccgatttcgatatggctgtgaaggcccctcccatggaggactgcccggtgcctccagtgagaagggccgaaagacctatcccactgtcaagatctgtaactacgagggaccagccaagatcgaggtggacctggtaacacacagtgacccacctcgtgctcatgcccacagtctggtgggcaagcaatgctcggagctggggatctgcgccgtttctgtggggcccaaggacatgactgcccaatttaacaacctgggtgtcctgcatgtgactaagaagaacatgatggggactatgatacaaaaacttcagaggcagcggctccgctctaggccccagggccttacggaggccgagcagcgggagctggagcaagaggccaaagaactgaagaaggtgatggatctgagtatagtgcggctgcgcttctctgccttccttagagccagtgatggctccttctccctgcccctgaagccagtcacctcccagcccatccatgatagcaaatctccgggggcatcaaacctgaagatttctcgaatggacaagacagcaggctctgtgcggggtggagatgaagtttatctgctttgtgacaaggtgcagaaagatgacattgaggttcggttctatgaggatgatgagaatggatggcaggcctttggggacttctctcccacagatgtgcataaacagtatgccattgtgttccggacacccccctatcacaagatgaagattgagcggcctgtaacagtgtttctgcaactgaaacgcaagcgaggaggggacgtgtctgattccaaacagttcacctattaccctctggtggaagacaaggaagaggtgcagcggaagcggaggaaggccttgcccaccttctcccagcccttcgggggtggctcccacatgggtggaggctctgggggtgcagccgggggctacggaggagctggaggaggtggcagcctcggtttcttcccctcctccctggcctacagcccctaccagtccggcgcgggccccatgcggtgctacccgggaggcgggggcggggcgcagatggccgccacggtgcccagcagggactccggggaggaagccgcggagccgagcgccccctccaggaccccccagtgcgagccgcaggccccggagatgctgcagcgagctcgagagtacaacgcgcgcctgttcggcctggcgcacgcagccccgagccctactcgactactgcgtcaccgcggacgccgcgcgctgctggcgggacagcgccacctgctgacggcgcaggacgagaacggagacacaccactgcacctagccatcatccacgggcagaccagtgtcattgagcagatagtctatgtcatccaccacgcccaggacctcggcgttgtcaacctcaccaaccacctgcaccagacgcccctgcacctggcggtgatcacggggcagacgagtgtggtgagctttctgctgcgggtaggtgcagacccagctctgctggatcggcatggagactcagccatgcatctggcgctgcgggcaggcgctggtgctcctgagctgctgcgtgcactgcttcagagtggagctcctgctgtgccccagctgttgcatatgcctgactttgagggactgtatccagtacacctggcggtccgagcccgaagccctgagtgcctggatctgctggtggacagtggggctgaagtggaggccacagagcggcaggggggacgaacagccttgcatctagccacagagatggaggagctggggttggtcacccatctggtcaccaagctccgggccaacgtgaacgctcgcacctttgcgggaaacacacccctgcacctggcagctggactggggtacccgaccctcacccgcctccttctgaaggctggtgctgacatccatgctgaaaacgaggagcccctgtgcccactgccttcaccccctacctctgatagcgactcggactctgaagggcctgagaaggacacccgaagcagcttccggggccacacgcctcttgacctcacttgcagcaccttggtgaagaccttgctgctaaatgctgctcagaacaccatggagccacccctgaccccgcccagcccagcagggccgggactgtcacttggtgatacagctctgcagaacctggagcagctgctagacgggccagaagcccagggcagctgggcagagctggcagagcgtctggggctgcgcagcctggtagacacgtaccgacagacaacctcacccagtggcagcctcctgcgcagctacgagctggctggcggggacctggcaggtctactggaggccctgtctgacatgggcctagaggagggagtgaggctgctgaggggtccagaaacccgagacaagctgcccagcacagaggtgaaggaagacagtgcgtacgggagccagtcagtggagcaggaggcagagaagctgggcccaccccctgagccaccaggagggctctcgcacgggcacccccagcctcaggtgactgacctgctgcctgcccccagcccccttcccggaccccctgtacagcgtccccacctatttcaaatcttatttaacaccccacacccacccctcagttgggacaaataaaggattctcatgggaaggggaggaccccgaattcct

SEQ ID NO: 663 - protein, 933 aa, Homo sapien
MESCYNPGLDGIIEYDDFKLNSSIVEPKEPAPETADGPYLVIVEQPKQRGFRFRYGCEGPSHGGLPGASSEKGRKTYPTVKICNYEGPAKIEVDLVTHSDPPRAHAHSLVGKQCSELGICAVSVGPKDMTAQFNNLGVLHVTKKNMMGTMIQKLQRQRLRSRPQGLTEAEQRELEQEAKELKKVMDLSIVRLRFSAFLRASDGSFSLPLKPVTSQPIHDSKSPGASNLKISRMDKTAGSVRGGDEVYLLCDKVQKDDIEVRFYEDDENGWQAFGDFSPTDVHKQYAIVFRTPPYHKMKIERPVTVFLQLKRKRGGDVSDSKQFTYYPLVEDKEEVQRKRRKALPTFSQPFGGGSHMGGGSGGAAGGYGGAGGGGSLGFFPSSLAYSPYQSGAGPMRCYPGGGGGAQMAATVPSRDSGEEAAEPSAPSRTPQCEPQAPEMLQRAREYNARLFGLAHAAPSPTRLLRHRGRRALLAGQRHLLTAQDENGDTPLHLAIIHGQTSVIEQIVYVIHHAQDLGVVNLTNHLHQTPLHLAVITGQTSVVSFLLRVGADPALLDRHGDSAMHLALRAGAGAPELLRALLQSGAPAVPQLLHMPDFEGLYPVHLAVRARSPECLDLLVDSGAEVEATERQGGRTALHLATEMEELGLVTHLVTKLRANVNARTFAGNTPLHLAAGLGYPTLTRLLLKAGADIHAENEEPLCPLPSPPTSDSDSDSEGPEKDTRSSFRGHTPLDLTCSTLVKTLLLNAAQNTMEPPLTPPSPAGPGLSLGDTALQNLEQLLDGPEAQGSWAELAERLGLRSLVDTYRQTTSPSGSLLRSYELAGGDLAGLLEALSDMGLEEGVRLLRGPETRDKLPSTEVKEDSAYGSQSVEQEAEKLGPPPEPPGGLSHGHPQPQVTDLLPAPSPLPGPPVQRPHLFQILFNTPHPPLSWDK

SEQ ID NO: 664 - DNA, 3446 bp, Homo sapien
ttctagtttgcggttcaggtttgccgctgccggccagcgtcctctggccatggacaccccggaaaatgtccttcagatgcttgaagcccacatgcagagctacaagggcaatgaccctcttggtgaatgggaaagatacatacagtgggtagaagagaattttcctgagaataaagaatacttgataactttactagaacatttaatgaaggaatttttagataagaagaaataccacaatgacccaagattcatcagttattgtttaaaatttgctgagtacaacagtgacctccatcaattttttgagtttctgtacaaccatgggattggaaccctgtcatcccctctgtacattgcctgggcggggcatctggaagcccaaggagagctgcagcatgccagtgctgtccttcagagaggaattcaaaaccaggctgaacccagagagttcctgcaacaacaatacaggttatttcagacacgcctcactgaaacccatttgccagctcaagctagaacctcagaacctctgcataatgttcaggttttaaatcaaatgataacatcaaaatcaaatccaggaaataacatggcctgcatttctaagaatcagggttcagagctttctggagtgatatcttcagcttgtgataaagagtcaaatatggaacgaagagtgatcacgatttctaaatcagaatattctgtgcactcatctttggcatccaaagttgatgttgagcaggttgttatgtattgcaaggagaagcttattcgtggggaatcagaattttcctttgaagaattgagagcccagaaatacaatcaacggagaaagcatgagcaatgggtaaatgaagacagacattatatgaaaaggaaagaagcaaatgcttttgaagaacagctattaaaacagaaaatggatgaacttcataagaagttgcatcaggtggtggagacatcccatgaggatctgcccgcttcccaggaaaggtccgaggttaatccagcacgtatggggccaagtgtaggctcccagcaggaactgagagcgccatgtcttccagtaacctatcagcagacaccagtgaacatggaaaagaacccaagagaggcacctcctgttgttcctcctttggcaaatgctatttctgcagctttggtgtccccagccaccagccagagcattgctcctcctgttcctttgaaagcccagacagtaacagactccatgtttgcagtggccagcaaagatgctggatgtgtgaataagagtactcatgaattcaagccacagagtggagcagagatcaaagaagggtgtgaaacacataaggttgccaacacaagttcttttcacacaactccaaacacatcactgggaatggttcaggcaacgccatccaaagtgcagccatcacccaccgtgcacacaaaagaagcattaggtttcatcatgaatatgtttcaggctcctacacttcctgatatttctgatgacaaagatgaatggcaatctctagatcaaaatgaagatgcatttgaagcccagtttcaaaaaaatgtaaggtcatctggggcttggggagtcaataagatcatctcttctttgtcatctgcttttcatgtgtttgaagatggaaacaaagaaaattatggattaccacagcctaaaaataaacccacaggagccaggacctttggagaacgctctgtcagcagacttccttcaaaaccaaaggaggaagtgcctcatgctgaagagtttttggatgactcaactgtatggggtattcgctgcaacaaaaccctggcacccagtcctaagagcccaggagacttcacatctgctgcacaacttgcgtctacaccattccacaagcttccagtggagtcagtgcacattttagaagataaagaaaatgtggtagcaaaacagtgtacccaggcgactttggattcttgtgaggaaaacatggtggtgccttcaagggatggaaaattcagtccaattcaagagaaaagcccaaaacaggccttgtcgtctcacatgtattcagcatccttacttcgtctgagccagcctgctgcaggtggggtacttacctgtgaggcagagttgggcgttgaggcttgcagactcacagacactgacgctgccattgcagaagatccaccagatgctattgctgggctccaagcagaatggatgcagatgagttcacttgggactgttgatgctccaaacttcattgttgggaacccatgggatgataagctgattttcaaacttttatctgggctttctaaaccagtgagttcctatccaaatacttttgaatggcaatgtaaacttccagccatcaagcccaagactgaatttcaattgggttctaagctggtctatgtccatcaccttcttggagaaggagcctttgcccaggtgtacgaagctacccagggagatctgaatgatgctaaaaataaacagaaatttgttttaaaggtccaaaagcctgccaacccctgggaattctacattgggacccagttgatggaaagactaaagccatctatgcagcacatgtttatgaagttctattctgcccacttattccagaatggcagtgtattagtaggagagctctacagctatggaacattattaaatgccattaacctctataaaaatacccctgaaaaagtgatgcctcaaggtcttgtcatctcttttgctatgagaatgctttacatgattgagcaagtgcatgactgtgaaatcattcatggagacattaaaccagacaatttcatacttggaaacggatttttggaacaggatgatgaagatgatttatctgctggcttggcactgattgacctgggtcagagtatagatatgaaactttttccaaaaggaactatattcacagcaaagtgtgaaacatctggttttcagtgtgttgagatgctcagcaacaaaccatggaactaccagatcgattactttggggttgctgcaacagtatattgcatgctctttggcacttacatgaaagtgaaaaatgaaggaggagagtgtaagcctgaaggtctttttagaaggcttcctcatttggatatgtggaatgaattttttcatgttatgttgaatattccagattgtcatcatcttccatctttggatttgttaaggcaaaagctgaagaaagtatttcaacaacactatactaacaagattagggccctacgtaataggctaattgtactgctcttagaatgtaagcgttcacgaaaataaaatttggatatagacagtccttaaaaatcacactgtaaatatgaatctgctcactttaaacctgtttttttttcatttattgtttatgtaaatgtttgttaaaaataaatcccatggaatatttccatgtaaaaaaaaa

SEQ ID NO: 665 - protein, 1085 aa, Homo sapien
MDTPENVLQMLEAHMQSYKGNDPLGEWERYIQWVEENFPENKEYLITLLEHLMKEFLDKKKYHNDPRFISYCLKFAEYNSDLHQFFEFLYNHGIGTLSSPLYIAWAGHLEAQGELQHASAVLQRGIQNQAEPREFLQQQYRLFQTRLTETHLPAQARTSEPLHNVQVLNQMITSKSNPGNNMACISKNQGSELSGVISSACDKESNMERRVITISKSEYSVHSSLASKVDVEQVVMYCKEKLIRGESEFSFEELRAQKYNQRRKHEQWVNEDRHYMKRKEANAFEEQLLKQKMDELHKKLHQVVETSHEDLPASQERSEVNPARMGPSVGSQQELRAPCLPVTYQQTPVNMEKNPREAPPVVPPLANAISAALVSPATSQSIAPPVPLKAQTVTDSMFAVASKDAGCVNKSTHEFKPQSGAEIKEGCETHKVANTSSFHTTPNTSLGMVQATPSKVQPSPTVHTKEALGFIMNMFQAPTLPDISDDKDEWQSLDQNEDAFEAQFQKNVRSSGAWGVNKIISSLSSAFHVFEDGNKENYGLPQPKNKPTGARTFGERSVSRLPSKPKEEVPHAEEFLDDSTVWGIRCNKTLAPSPKSPGDFTSAAQLASTPFHKLPVESVHILEDKENVVAKQCTQATLDSCEENMVVPSRDGKFSPIQEKSPKQALSSHMYSASLLRLSQPAAGGVLTCEAELGVEACRLTDTDAAIAEDPPDAIAGLQAEWMQMSSLGTVDAPNFIVGNPWDDKLIFKLLSGLSKPVSSYPNTFEWQCKLPAIKPKTEFQLGSKLVYVHHLLGEGAFAQVYEATQGDLNDAKNKQKFVLKVQKPANPWEFYIGTQLMERLKPSMQHMFMKFYSAHLFQNGSVLVGELYSYGTLLNAINLYKNTPEKVMPQGLVISFAMRMLYMIEQVHDCEIIHGDIKPDNFILGNGFLEQDDEDDLSAGLALIDLGQSIDMKLFPKGTIFTAKCETSGFQCVEMLSNKPWNYQIDYFGVAATVYCMLFGTYMKVKNEGGECKPEGLFRRLPHLDMWNEFFHVMLNIPDCHHLPSLDLLRQKLKKVFQQHYTNKIRALRNRLIVLLLECKRSRK

SEQ ID NO: 666 - DNA, 876 bp, Homo sapien
gcgcagaagcggcggcggtggtggcttgtggtgcggcctcaccatacaggaacagggcagacgttagcgtgagtgatcactctcaatcccggggacctggtggccttagtctttcaggtggaacggtgtgcgacatgggaaagaaaaccaagcggacagctgacagttcttcttcagaggatgaggaggagtatgttgtggagaaggtgctagacaggcgcgtggttaagggacaagtggaatatctactgaagtggaaaggcttttctgaggagcacaatacttgggaacctgagaaaaacttggattgccctgagctaatttctgaatttatgaaaaagtataagaagatgaaggagggtgaaaataataaacccagggagaagtcagaaagtaacaagaggaaatccaatttctcaaacagtgccgatgacatcaaatctaaaaaaaagagagagcagagcaatgatatcgctcggggctttgagagaggactggaaccagaaaagatcattggggcaacagattcctgtggtgatttaatgttcctaatgaaatggaaagacacagatgaagctgacctggttcttgcaaaagaagctaatgtgaaatgtccacaaattgtgatagcattttatgaagagagactgacatggcatgcatatcctgaggatgcggaaaacaaagagaaagaaacagcaaagagctaaaggaggggatggtctctgtcatttctctttgtacataatacattcacctccctgcctcctctcctttctacccacccctttctatcctaaacacatccataaaaaatgtgcttatcactgtgctccacaaaaaaaaaaaaaaaaaaaaaaaaaaaaaaaaaaaaaa

SEQ ID NO: 667 - protein, 191 aa, Homo sapien
MGKKTKRTADSSSSEDEEEYVVEKVLDRRVVKGQVEYLLKWKGFSEEHNTWEPEKNLDCPELISEFMKKYKKMKEGENNKPREKSESNKRKSNFSNSADDIKSKKKREQSNDIARGFERGLEPEKIIGATDSCGDLMFLMKWKDTDEADLVLAKEANVKCPQIVIAFYEERLTWHAYPEDAENKEKETAKS

SEQ ID NO: 668 - DNA, 3452 bp, Homo sapien; identical to SEQ ID NO: 536

SEQ ID NO: 669 - protein, 513 aa, Homo sapien; identical to SEQ ID NO: 537

SEQ ID NO: 670 - DNA, 1403 bp, Homo sapien
caaatccgtgctcctagatttgcaggttctgatactgtggttcgagctacactcgccgcctgggcagacactcgtccaaaccactggagtgtgctggtgatcgcagccagcccttcgcctctccatgaacccgtgagcctggggcaggtgccaggcgatggcgcggcctgtgagcgacaggaccccggcccctctgctgctgggcggcccggccgggacaccccctggcgggggagcgctgcttgggttgcggagccttctgcaggggaccagcaagcccaaagagccggccagctgtctcctgaaggaaaaggagcgcaaggcggccctgcctgcagccacaacccctgggccaggcctggagactgcgggcccggcggatgccccggctggggcagtggtgggcggagggtccccgcgggggcgcccggggccggtgcccgccccgggtctgttggcgccactgctgtgggagcgcacgctgccgttcggcgatgtggagtacgtagacctggacgccttcctgctggagcacgggctcccgcccagcccgccgccccccggtggcccgtcgccggagccgtcgcccgcgcggacgcccgcaccctccccagggccgggttcgtgcggctcggcttccccccgctcctctcctgggcacgcccccgcccgggctgccctcgggaccgccacgggccaccgcgcaggcctgacctctcgggacacacccagccctgtggacccagacaccgtggaggtgttgatgacctttgaacccgacccagctgatcttgccctatcaagcattcctggccacgagacctttgaccctcgaagacatcgcttctcagaagaggaacttaagccccagccaatcatgaagaaggcaagaaaaatccaggtgccggaggagcagaaggatgagaaatactggagccggcggtacaagaacaacgaggcagccaagcggtcccgtgacgcccggcggctcaaggagaaccagatatcggtgcgggcggccttcctggagaaggagaacgccctgctgcggcaggaagttgtggccgtgcgccaggagctgtcccactaccgcgccgtgctgtcccgataccaggcccagcacggggccctgtgaggctgccccacatccccacctggcaggcgtctcctccgcttgctgagacttacgccctgttcccttcctgccctgtgcccacgggccggccagctgggtgccccagggacgtgataatgcagataaatacatttatatttttaagaaaaagcgagcctcccccctcttgcgggggcggggagggttctctgtgtgtccccggcacgtcagggaccctatcctcccaccgcctccgttaacacgatcctgaataaatcttgagaacccc

SEQ ID NO: 671 - protein, 325 aa, Homo sapien
MARPVSDRTPAPLLLGGPAGTPPGGGALLGLRSLLQGTSKPKEPASCLLKEKERKAALPAATTPGPGLETAGPADAPAGAVVGGGSPRGRPGPVPAPGLLAPLLWERTLPFGDVEYVDLDAFLLEHGLPPSPPPPGGPSPEPSPARTPAPSPGPGSCGSASPRSSPGHAPARAALGTATGHRAGLTSRDTPSPVDPDTVEVLMTFEPDPADLALSSIPGHETFDPRRHRFSEEELKPQPIMKKARKIQVPEEQKDEKYWSRRYKNNEAAKRSRDARRLKENQISVRAAFLEKENALLRQEVVAVRQELSHYRAVLSRYQAQHGAL

SEQ ID NO: 672 - DNA, 1702 bp, Homo sapien
agactcaacaagagctccagcaaagactttcactgtagcttgacttgacctgagattaactagggaatcttgagaataaagatgagctctgaaaattgtttcgtagcagagaacagctctttgcatccggagagtggacaagaaaatgatgccaccagtccccatttctcaacacgtcatgaagggtccttccaagttcctgtcctgtgtgctgtaatgaatgtggtcttcatcaccattttaatcatagctctcattgccttatcagtgggccaatacaattgtccaggccaatacacattctcaatgccatcagacagccatgtttcttcatgctctgaggactgggttggctaccagaggaaatgctactttatttctactgtgaagaggagctggacttcagcccaaaatgcttgttctgaacatggtgctactcttgctgtcattgattctgaaaaggacatgaactttctaaaacgatacgcaggtagagaggaacactgggttggactgaaaaaggaacctggtcacccatggaagtggtcaaatggcaaagaatttaacaactggttcaacgttacagggtctgacaagtgtgtttttctgaaaaacacagaggtcagcagcatggaatgtgagaagaatttatactggatatgtaacaaaccttacaaataataaggaaacatgttcacttattgactattatagaatggaactcaaggaaatctgtgtcagtggatgctgctctgtggtccgaagtcttccatagagactttgtgaaaaaaaattttatagtgtcttgggaattttcttccaaacagaactatggaaaaaaaggaagaaattccaggaaaatctgcactgtgggcttttattgccatgagctagaagcatcacaggttgaccaataaccatgcccaagaatgagaagaatgactatgcaacctttggatgcactttatattattttgaatccagaaataatgaaataactaggcgtggacttactatttattgctgaatgactaccaacagtgagagcccttcatgcatttgcactactggaaggagttagatgttggtactagatactgaatgtaaacaaaggaattatggctggtaacataggtttttagtctaattgaatcccttaaactcagggagcatttataaatggacaaatgcttatgaaactaagatttgtaatatttctctctttttagagaaatttgccaatttactttgttatttttccccaaaaagaatgggatgatcgtgtatttatttttttacttcctcagctgtagacaggtccttttcgatggtacatatttctttgcctttataatcttttatacagtgtcttacagagaaaagacataagcaaagactatgaggaatatttgcaagacatagaatagtgttggaaaatgtgcaatatgtgatgtggcaaatctctattaggaaatattctgtaatcttcagacctagaataatactagtcttataataggtttgtgactttcctaaatcaattctattacgtgcaatacttcaatacttcatttaaaatatttttatgtgcaataaaatgtatttgtttgtattttgtgttcagtacaattataagctgtttttatatatgtgaaataaaagtagaataaacacaaaaaaaaaaaaaaaaaaaaaaaaaaaa

SEQ ID NO: 673 - protein, 199 aa, Homo sapien
MSSENCFVAENSSLHPESGQENDATSPHFSTRHEGSFQVPVLCAVMNVVFITILIIALIALSVGQYNCPGQYTFSMPSDSHVSSCSEDWVGYQRKCYFISTVKRSWTSAQNACSEHGATLAVIDSEKDMNFLKRYAGREEHWVGLKKEPGHPWKWSNGKEFNNWFNVTGSDKCVFLKNTEVSSMECEKNLYWICNKPYK

SEQ ID NO: 674 - DNA, 5471 bp, Homo sapien
ccggggtcccctttcacccaagtgagccagctcaggctgtctgcaaagccggaggtgcgggcagctccgggcattgcattggtgcggaggcttttatatgccagagaaccctgagtgtgcccctgacatgacaaggagccgtcgtcgttaggactaccgaccagactcccggaaatcatgttggtaggatcccagtctttttcgcctggagggcccaatgggatcattagaagccagtcctttgcgggtttcagcggcctccaggaaaggcgatccaggtgtaactccttcattgaaaattcctccgctctcaagaagcctcaggccaaactgaagaaaatgcacaatttaggccacaaaaacaacaatccccccaaagagcctcagcctaaaagggtggaagaagtctacagggccttgaaaaatggacttgatgaatatctggaggttcaccagacggagctggacaagttgacagctcagttaaaagatatgaaaagaaactctcgcctgggtgtactgtatgacctagacaagcaaattaaaacaattgaaagatacatgagacgcctggagtttcatataagtaaggtagatgaactctatgaagcttattgtatccagcgacgcctccaggatggtgccagcaaaatgaagcaagccttcgcaacatcccctgccagcaaagctgcccgggagagtctgacagagatcaatcggagcttcaaggagtacacagagaatatgtgcaccattgaagtggagctagagaatctgctgggagaattctccatcaagatgaaaggtctggctggctttgcacgcctctgtcctggagatcaatatgaaattttcatgaagtatggccggcagcggtggaaactgaaaggcaaaatagaagtaaatggcaagcagagctgggatggagaagaaacagtttttctgcccctgatagttgggttcatctccatcaaggtcacggagctcaaagggctagcaactcacatcctggtaggtagcgtgacctgtgagaccaaagagctgtttgcagcccgacctcaggtagtggctgtcgacatcaatgaccttggtaccatcaaactgaacctggaaatcacctggtatccatttgacatggaggacatgaccgcatcctcaggcgctgggaacaaggcagcagcccttcagaggagaatgtccatgtacagccagggtaccccggaaacgcccaccttcaaagaccactccttctttaggtggctgcatccttccccagacaagcccaggcggctgtctgtcttgagtgccttgcaagacactttctttgccaagctgcaccgcagccgctccttcagtgacctgccctccctcaggccgagtcccaaggccgtgctagagctctattcaaatctacctgatgacatctttgaaaatggaaaggcagccgaggagaaaatgccactgtcgctcagcttcagtgacctgcccaacggggactgcgccctcacctcccactcaacaggctccccttccaactcaacaaatccagaaattaccatcacccctgcggagtttaacctcagcagcttggcctcccagaatgagggtatggatgacaccagctcagcatcttccaggaactccctgggagaaggccaagagccaaagtcacacctgaaggaggaagacccagaggagcccagaaaacctgcctcggccccatctgaggcttgccgccgacagtcctcaggtgctggggctgagcacctgttccttgagaatgatgttgcagaagcacttctgcaagagtctgaggaggcctctgagctcaagcctgtggaactggacacttcggaaggaaacatcacaaagcagctggtcaagaggctcacatctgcagaggtgccaatggccacagacaggctgctctctgagggttctgttggtggagaatctgaaggctgcagatcctttctagatggaagcttagaggatgcttttaatgggcttttacttgcattagaaccacataaagagcagtataaagagtttcaggatctgaaccaagaagtcatgaatttggatgatattctaaaatgcaagccagcagtaagccgcagcaggtcttccagtttaagtctcacagttgaaagtgctttagaaagctttgatttcctgaacacctctgattttgacgaggaggaggatggtgatgaggtttgtaatgttggcggaggtgctgactcagtattttcagacactgagactgagaaacacagttacaggtcggttcacccagaagccagggggcatctcagtgaagcgctcactgaagacacaggagttgggaccagtgtggcaggaagtcctctcccactgaccacaggcaacgagagcctggacatcaccatcgtcaggcacctccagtactgcacccaactcgtgcagcaaattgttttctcaagcaaaaccccatttgtggcaagaagtctcttagagaagctttctaggcagatccaagtgatggagaaactcgcagctgtcagtgatgagaacataggaaatatcagttctgttgtggaagccataccagaatttcacaaaaagctgtctttgctgtcattctggaccaagtgctgcagccctgttggtgtctaccacagcccagcggacagagtgatgaagcagctggaggccagctttgccagaactgtcaacaaagaatatccaggacttgcagacccagtgtttcgaaccctggtgtcccaaattctggaccaggctgagcctctgctttcctccagcctgtcctcggaagtcgtcactgttttccagtattacagttacttcaccagccacggcgtcagtgacctggagagttacctgagccagctggccaggcaagtttccatggttcagactctgcaatcactaagagatgaaaaactgctacaaaccatgagtgaccttgctcccagcaacctcctggcccagcaggaagtactcaggactctggctctgctattaaccagagaggacaacgaagttagcgaggctgtgacgctttacttggcagcagcctccaaaaatcagcatttcagggaaaaggccttgctctattactgtgaagcactaacaaagacaaacctccagctccagaaagcagcttgcctggctctgaaaatccttgaggctactgaaagcattaaaatgctggtgacattgtgtcaatctgatactgaagaaatcagaaatgtggcctcagaaaccctcttgtctctgggagaagatgggcggctggcatatgaacaattggacaaatttcctcgagactgtgttaaagtcggaggtcgtcatggaactgaagttgccacagccttttaattacagattaactgcctaacagctgtcttaatatctggcccttttcatcaggatggtgctgtggtttgggctggaaattgtttagagcctgagagacacgacaactgaaataaaaatgtaggccaggtgcagtggctcatgcctgtaatcccagtactttgggaggccaacgcaggagaattgcttaagcccaggaggttcaagaccaacctgggcaacatagcaaggccctgtctctacaaaaaaaatagtttaattagtcgggcgtggtggcatgcacctgtagtcccagctacttgggaggctaaggtgggaggattgcttgagcccagaagattcaggctgcagtgagccataattgccccactgcactccagactgggtgacagagcaaaaccctgtctcaaaaaacaaaacaacaacaacaactaaaaaaacatgttatagaaagaattcagagtctcgtttcacagtacctatctacttttcctttggccaatatagaatagggctatggtataattcaaatagattacatcgtcgattgtgtctaataatactcagtgaaagagtccatcttatcttaatatgtatgaaatttaaaaatagccatctttgtacttttttgcaagtttctctataagcttgaaatagtcatgtgatacttcgacaaacatcatatgccttgcagtttttctcggtcgtgttctcagggttgagtagtccccttagctacctaactttactttcaatacaaagcacaaaaaagaatacttcaaataaaagtttgcctgcagaacctggcaaaatgacccattatgagagtttagatgttttaattttatgtgctcccagctactctggagtctgaggtgggaggatcacttgaggcagaggttgcagtaagctgagattacactactgcactccagcccatgtgacagaggaatgagagccagtctcaaaaaaaaaaaacaaaaaactcccataatttattttgtttcttttccccatcctgaaaattcccaaatcatgtttccattatggaaaaatgataagtaaatgactaagaactacattaagattatgcctatacacttaaacaaaaaactcaaagcttatgctttttttttttaattaatgagagctattttttatgatattcttaccataggggtgttttgctgctaagacaaatcaaaaccaaaagctgtagattcacaaacctgtgatgctctttgaggtggaggaacctagaagtcagagaaatcctaatggagtaggagtggaggaacatttaaagtggtccctccttctgtaaaaatgaccgtgggattagaaagaaggacatcctgaggggtggttactgcccccagggaaatcactcactggtaggattccctggccaaatagttcaaacatcaggtcccattattgcttcagtatcagagatgcaagttcattaagcaaagtacaagaccattcagtagctcttattaaaatatcttttcttcctctaaagagtgtacaaggtggggtatgccaaggtatcaaaacaatatatgtgagtgtaatttaaactgtggaatatcaactgtactatggacgtgtttgtatcatttagatgtcattttaaatatttacattttagcaagacttttaaaaaggactcatttcatttcaaagtgcaaattgtttgccaggcttctggcaaatggttctttcaactgtgaacttatagtgtacatatctgtatatttataaatattatatatattcatacatccttcagtttaaaggtacattgtacagtctgtagttaggaggtatagcctatagcttatgttaaatggttgaaatggttctttttatagaaagtcaaacacagatgttacaggattttgtgtttggtttgtcatttttttattttttattttgactattgcatgagtaattaattccagatcttttgtattcacttctgtattttatgtttggttgaggggtgcttttagttgtgtggcatttgtattcattgatctttcagtcatgtaagttaaaataaaaattatttttgaattactagc

SEQ ID NO: 675 - protein, 1068 aa, Homo sapien
MLVGSQSFSPGGPNGIIRSQSFAGFSGLQERRSRCNSFIENSSALKKPQAKLKKMHNLGHKNNNPPKEPQPKRVEEVYRALKNGLDEYLEVHQTELDKLTAQLKDMKRNSRLGVLYDLDKQIKTIERYMRRLEFHISKVDELYEAYCIQRRLQDGASKMKQAFATSPASKAARESLTEINRSFKEYTENMCTIEVELENLLGEFSIKMKGLAGFARLCPGDQYEIFMKYGRQRWKLKGKIEVNGKQSWDGEETVFLPLIVGFISIKVTELKGLATHILVGSVTCETKELFAARPQVVAVDINDLGTIKLNLEITWYPFDMEDMTASSGAGNKAAALQRRMSMYSQGTPETPTFKDHSFFRWLHPSPDKPRRLSVLSALQDTFFAKLHRSRSFSDLPSLRPSPKAVLELYSNLPDDIFENGKAAEEKMPLSLSFSDLPNGDCALTSHSTGSPSNSTNPEITITPAEFNLSSLASQNEGMDDTSSASSRNSLGEGQEPKSHLKEEDPEEPRKPASAPSEACRRQSSGAGAEHLFLENDVAEALLQESEEASELKPVELDTSEGNITKQLVKRLTSAEVPMATDRLLSEGSVGGESEGCRSFLDGSLEDAFNGLLLALEPHKEQYKEFQDLNQEVMNLDDILKCKPAVSRSRSSSLSLTVESALESFDFLNTSDFDEEEDGDEVCNVGGGADSVFSDTETEKHSYRSVHPEARGHLSEALTEDTGVGTSVAGSPLPLTTGNESLDITIVRHLQYCTQLVQQIVFSSKTPFVARSLLEKLSRQIQVMEKLAAVSDENIGNISSVVEAIPEFHKKLSLLSFWTKCCSPVGVYHSPADRVMKQLEASFARTVNKEYPGLADPVFRTLVSQILDQAEPLLSSSLSSEVVTVFQYYSYFTSHGVSDLESYLSQLARQVSMVQTLQSLRDEKLLQTMSDLAPSNLLAQQEVLRTLALLLTREDNEVSEAVTLYLAAASKNQHFREKALLYYCEALTKTNLQLQKAACLALKILEATESIKMLVTLCQSDTEEIRNVASETLLSLGEDGRLAYEQLDKFPRDCVKVGGRHGTEVATAF

SEQ ID NO: 676 - DNA, 2742 bp, Homo sapien
cccgcctcttcctcccttccttctttccttgctttcgccgcgcactccgccgccatggagcagcgccgcgtcaccgacttcttcgcgcgccgccgccccgggcccccccgcatcgcgccgcccaagctggcctgccgcacccccagccccgccaggcccgcactccgcgccccggcctccgctaccagtggcagccgcaagcgcgcccgcccgcccgccgcccccggacgcgaccaggccaggccaccggcccgcaggagactgcggctgtcggtggacgaggtttccagccccagtacccccgaggccccagacatcccagcctgcccttctccgggccagaagataaagaaatccaccccggcagcaggtcagccgccccacctgacatccgcgcaggaccaggacaccatctctgagcttgcgtcatgcctgcaacgggcccgggagctgggggcaagagtccgggcgctgaaggccagtgcccaggatgctggggagtcctgcaccccagaggccgagggccgccctgaggagccatgtggcgagaaggcgcccgcctaccagcgcttccatgccctggcccagcccggcctgccgggactcgtgctgccctacaagtaccaggtgctggcggagatgttccgcagcatggacaccatcgtgggcatgctccacaaccgctccgagacgcccacctttgccaaggtccagcggggcgtccaggacatgatgcgtaggcgttttgaggagcgcaatgttggccagatcaaaaccgtgtacccggcctcctaccgcttccgccaggagcgcagtgtccccaccttcaaggatggcgccaggaggtcagattaccagctcaccatcgagccactgctggagcaggaggctgacggagcagccccccagctcacggcctcgcgcctcctgcagcgacggcagatcttcagccagaagctggtggagcacgtcaaggagcaccacaaggccttcctggcctccctgagccccgccatggtggtgccggaggaccagctgacccgctggcacccgcgcttcaacgtggatgaagtacccgacatcgagccggccgcgctgccccagccacccgccacggagaagctcaccactgctcaggaggtgctggcccgggcccgcaacctgatttcacccaggatggagaaggccttgagtcaattggccctgcgctctgctgcgcccagcagccccgggtctcccaggccagcactgccggctaccccaccagccaccccgcctgcagcctctcccagtgctctgaagggggtgtcccaggatctgctggagcggatccgagccaaggaggcacagaagcagctggcacagatgacgcggtgcccggagcaggagcagcggctgcagcgcttagaacggctgcctgagctggcccgcgtgctgcggagcgtctttgtgtccgaacgcaagcctgcgctcagcatggaggtggcctgtgccaggatggtgggcagctgttgtactatcatgagccctggggaaatggagaagcacctgctgctcctctccgagctgctgccggactggctcagcctccaccgcatccgcaccgacacctacgtcaagctggacaaggccgcggacctggcccacatcactgcacgcctggcccaccagacacgtgctgaggaggggctgtgagcctgggggccactgtggacagacgtgggcttcagaagctcgctggcctgggcccaccagcattttcttttatgaacatgatacactttggccttcctttccccagcgcccctgagggccagaggcagatgtgggctgcaggctgcacagcccgagggtctctggctgcgggcggtgggccccttcatggggctcacctggtggattcacattaaaccggtttctgtgggcacctttgtccttgctgctggtggggaagggaagccagatccagcaccccctggggggccatcgggagtgtggctgggggtgaagggggctctgtggcaatatggggttgggtagtgtgggtggcaggccatcccctctaatcttggaacctctgaatatgggacctcccacagcaaagggtgacttttgtcattaagaaagactggggtgggtgtggtggctcacgcctgtaaccccagcactttgggaggccaaggtgggcagatcacgaggtcaagagatcgagaccatcctggcgaacatggtgaaaccccatctctactaaaaatacaaaaaattagccgggtgtggtggtgggcacctgtcgtcccagctactagggaggctgaggcaggagaatggtgtgaacccaggaggcacagcttgcagtgagcgaagatcgcaccactgcacgcactccagcctgggtgacagagcgagactccgtctcaaaaaaaaaaatttcaagactggagaggtgatcctgaattgtccagctacgccccatgtcatcacagggccttcatgacagggccagagccagccagctttgaagacgcggccctgccccgacacaggcagcctggagaagctgggcaggacaagtaggacatccctggagcctccagaagggactggcctctgcccacaccttgacttcagtatttctgacctcctaaactctaataaagtcatgcttacagccactaaaaaaaaaaaaaaaaaaaaaaaaaaaaaaaaaaaaaaaaaaaaaaaaaaaaaaaaaaaaaaaaaaaa

SEQ ID NO: 677 - protein, 546 aa, Homo sapien
MEQRRVTDFFARRRPGPPRIAPPKLACRTPSPARPALRAPASATSGSRKRARPPAAPGRDQARPPARRRLRLSVDEVSSPSTPEAPDIPACPSPGQKIKKSTPAAGQPPHLTSAQDQDTISELASCLQRARELGARVRALKASAQDAGESCTPEAEGRPEEPCGEKAPAYQRFHALAQPGLPGLVLPYKYQVLAEMFRSMDTIVGMLHNRSETPTFAKVQRGVQDMMRRRFEERNVGQIKTVYPASYRFRQERSVPTFKDGARRSDYQLTIEPLLEQEADGAAPQLTASRLLQRRQIFSQKLVEHVKEHHKAFLASLSPAMVVPEDQLTRWHPRFNVDEVPDIEPAALPQPPATEKLTTAQEVLARARNLISPRMEKALSQLALRSAAPSSPGSPRPALPATPPATPPAASPSALKGVSQDLLERIRAKEAQKQLAQMTRCPEQEQRLQRLERLPELARVLRSVFVSERKPALSMEVACARMVGSCCTIMSPGEMEKHLLLLSELLPDWLSLHRIRTDTYVKLDKAADLAHITARLAHQTRAEEGL

SEQ ID NO: 678 - DNA, 1610 bp, Homo sapien
gctcagatacgcgacgcgtagcaggcggggaccgaacgggtgcctcagtgtccttcccctcccctcgcctggcctcgccgtcctctccccgcagccggaccggaactatgtgatcccggaagttccggggcctttgctgtgtgggataaacagtaatggcggaggctgcaactcccggaacaacagccacaacatcaggagcaggagcggcagcggcgacggcggcagcagcctcccccaccccgatccccacagtcaccgccccgtccctgggggcgggcggagggggcggcggcagcgacggcagcggcggcggctggactaaacaggtcacctgcaggtattttatgcatggggtttgtaaggaaggagacaactgtcgctactcgcatgacctctctgacagtccgtatagtgtagtgtgcaagtattttcagcgagggtactgtatttatggagaccgctgcagatatgaacatagcaaaccattgaaacaggaagaagcaactgctacagagctaactacaaagtcatcccttgctgcttcctcaagtctctcatcgatagttggaccacttgttgaaatgaatacaggcgaacgtgagtcaagaaattcaaactttgcaactgtaggagcaggttcagaggactgggtgaatgctattgagtttgttcctgggcaaccctactgtggccgtactgcgccttcctgcactgaagcacccctgcagggctcagtgaccaaggaagaatcagagaaagagcaaaccgccgtggagacaaagaagcagctgtgcccctatgctgcagtgggagagtgccgatacggggagaactgtgtgtatctccacggagattcttgtgacatgtgtgggctgcaggtcctgcatccaatggatgctgcccagagatcgcagcatatcaaatcgtgcattgaggcccatgagaaggacatggagctctcatttgccgtcagcagcaaggacatggtgtgtgggatctgcatggaggtggtctatgagaaagccaaccccagtgagcgccgcttcgggatcctctccaactgcaaccacacctactgtctcaagtgcattcgcaagtggaggagtgctaagcaatttgagagcaagatcataaagtgagactcctccccagtcttcatttgtgctttctcttttggggaagaatttagtaacttgtgccaactttcaaccagatggaccgcatttaaatgcatgcattttatcttgaaactgggatattctaatggggatttcttctttgtatttcagctagcttctaggttagttggtctatctacttttatttgaatgaggaaaccctgtgtatcagttagaatcttcgtgctttttctgaggagattgtgtttaatggattattagccagtttaggctcagtgaacaaactgatctagctctgaatgtatgtttcctgacgttttacatttccactttcctattccattcattaagctagccaacaatccaccatcctttaaagattgttctcataactgaacaaaaaccacataatctaaacagagcaaagctacaagaaataaatttatttaaacgaaaaaaaaaaaaaaa

SEQ ID NO: 679 - protein, 328 aa, Homo sapien [sequence omitted]

SEQ ID NO: 680 - DNA, 2164 bp, Homo sapien
ggctcgagtgcctggcgggctctggcttccgcgtccgcccctgctccggcttcgcccgcagctccgcgcccgcgggcaaccaagcccccagcgaagcccgcacagctccgggtgccaggacggggggccatgccgtgccggagggaggaggaagaggaagccggcgaggaggcggagggggaggaagaggaggacgacagcttcctcctgctgcagcagtcggtgacgctgggcagctcgggcgaggtggaccggctggtggcccagatcggcgagacgctgcagctggacgcggcgcaggacagcccggcctcgccgtgcgcgcccccgggggtgccgctgcgggccccggggcccctggctgcggcggtgccggcggacaaggcccggcccccggcggtgccgctgctgctgccgcccgcttcggctgagacggtgggcccggcgccctctggggccctgcgctgcgccctaggggaccgcggccgcgtgcgcggacgcgctgcgccctactgcgtggcggaggtcgccgcaggccccagcgcgctgccggggccgtgccggcgaggatggctcagggacgcggtcacctcccgccgcttgcagcagcgccgatggacccaagccggggcacgcgccggcgacgacgacccgcatcggctcctccagcagctcgtgctctcgggaaacctcatcaaggaagccgtgcggagactccaacgagccgtcgccgcggttgcagccacgggccccgcaagcgcccctgggcccgggggaggccgcagcggacctgaccgcattgccctgcagccctcaggctccttgctctgacgcaggcctcctggaggaggaagtggaggccgctgcgtagacccaacagcgtccagttcctactaactctgagctgaagccgacgtcgccagcctgggagcgaccactttggctgcggggaggcgcgtggggagagatctcaaccagagaagttaccagccgcggcgaggccgtcggagaaaacttaagcgtggagaaatgtatgcgccagggtgcttccgtggggcatgagaatttcccgggccatccaagcccaaggacctgggataaactgggagaactatggcagctacttgcatcgacttgtacctcacttagcccttgggggcgtcgtgagcttggattgtttaaggagggctcaggggtaggaatcgcgatggctttataacaatacttgaaaactaacgacacgcatacattttcttattttctggtggaggagcttagtaagtggtgctacaattgctgtgcaaagaaattccagaggggagaagaatgtaaaagtttggtggtgggtggcttggcattgcccctttttcccaccgattcggtggctggtgaaggtgggagatgtgaactccaattaagggactggagagaggtgaagaattttgcaggtgggagatttggatttgaatgtggacttgtaaatgacttgaccttgccatctgtgttcaaggtcacggtttgctgtggggttcctgggagagcttactcaccccggagtcttttctttctcttgctccaagaagagccctgttggtgctttaccaccgcttggagtctcccgaggacacaaacaggcagagagggacgtgtagggagagttctttcctgttttctgtgctttcctttttacaggactcccggaaggccactcatggccatgccaggagctttctcagaaacagtcataaacgatctcttgagtctctttcttgtcctcccagctgagctttcttattccaccctttctggtgtctataggaatgcatgagagaccctggacgtttttctgctctcttctggccctccatggagccatgggcctcggcctcggcggctcctcaccctcacaatttatttcctcctcccgtgccagcccttcttttgtgtctgaaaccggttttaaaatgtgactctcccagagaagaagccgctggctgtatgaaacttgacggcgcttttgtaaggtgccacccccaaactttaaggtagctaaaccaatttttaaaagattcaatggcttgttcatcctccagatgtagctattgatgtacacttcgcaacggagtgtctgaaattgtggtggtcctgatttataggatttcat

SEQ ID NO: 681 - protein, 233 aa, Homo sapien
MPCRREEEEEAGEEAEGEEEEDDSFLLLQQSVTLGSSGEVDRLVAQIGETLQLDAAQDSPASPCAPPGVPLRAPGPLAAAVPADKARPPAVPLLLPPASAETVGPAPSGALRCALGDRGRVRGRAAPYCVAEVAAGPSALPGPCRRGWLRDAVTSRRLQQRRWTQAGARAGDDDPHRLLQQLVLSGNLIKEAVRRLQRAVAAVAATGPASAPGPGGGRSGPDRIALQPSGSLL

SEQ ID NO: 682 - DNA, 3457 bp, Homo sapien
  Unsure 3036: Unknown base
atggctgtgtgaacgactgccatggcccaccggaagcttgagagcgtggggagcggcatgttggaccatagggtgagaccaggtcctgtccctcacagccaggagcccgagagcgaggacatggagctgcccttggagggctatgtgcccgagggcctggagctggctgccctgcggccagagagccccgcgccagaggaacaggagtgccacaaccacagccccgatggggactccagctctgactacgtgaacaacacctctgaggaggaggactatgacgagggcctccctgaggaggaggagggcatcacctactacatccgctactgccctgaggacgacagctacctagagggcatggactgcaacggggaggagtacctggcccacagtgcacaccctgtggacactgatgaatgccatgaggcggtggaggagtggacggactcggcgggcccgcacccccacggccacgaggctgaaggcagccaggactacccagacggccaactgcccattccggaggatgagccctccgtccttgaggcccatgaccaggaagaagatggtcactactgtgccagcaaagagggctaccaggactactacccagaggaggccaacgggaacaccggcgcctccccctaccgcctgaggcgtggggatggggacctggaggaccaggaggaggacattgaccagatcgtggcagagatcaagatgagtctgagcatgaccagcatcaccagcgccagtgaggccagccccgagcatgggcctgagccagggcctgaggactctgtagaggcctgcccacccatcaaggccagctgcagccccagcaggcacgaggcgaggcccaagtcgctgaacctccttcccgaggccaagcaccccggagacccccagagaggcttcaagcccaagaccaggaccccagaagagaggctgaagtggccccacgagcaggtttgcaatggtctggagcagccaaggaagcagcagcgctctgatctcaatggacctgttgacaataacaacattccaaaaacaaaaaaggtggcatcatttccaagtttggtggctgttccagggccctgcgaaccaaaaaacctcatcgacgggatcatctttgctgccaattacctggggtccacccagctgctatcagaacggaacccttccaaaaacatcagaatgatgcaagcgcaggaggccgtcagccgggtcaagaggatgcaaaaggctgctaagatcaagaaaaaagcgaattctgagggggatgcccagacgctgacggaagtggacctcttcatttccacccagaggatcaaggttttaaatgcagacacgcaggaaaccatgatggaccacgccttgcgtaccatctcctacatcgccgacattgggaacattgtagtgctgatggccagacgccgcatgccccggtcagcctctcaggactgcatcgagaccacgcccggggcccaggaaggcaagaagcagtataagatgatctgccatgtgttcgagtcggaggatgcccagctcatcgcccagtctatcggccaggccttcagcgtggcctaccaggagttcctgcgagccaatggcatcaaccccgaagacttgagccagaaggaatacagcgacatcatcaacacccaggagatgtacaacgacgacctcatccacttctcaaactcggagaactgcaaggagctgcagctggagaagcacaagggcgagatcctgggcgtggtggtggtggagtcgggctggggctccatcctgcccacggtgatcctggccaacatgatgaatggcggcccggctgcccgctcggggaagctgagcatcggggaccagatcatgtccatcaatggcaccagcctggtggggctgcccctcgccacctgccaaggcatcatcaagggcctgaagaaccagacacaggtgaagctcaacattgtcagctgtcccccggtcaccacggtccttatcaagcggccagacctcaagtaccagctgggcttcagcgtgcagaatggaattatctgcagcctcatgagagggggcattgctgagcgagggggcgtccgtgtgggccaccgcatcatcgagatcaacgggcagagcgtggtggccacagcccacgagaagatagtccaagctctgtccaactcggtcggagagatccacatgaagaccatgcccgccgccatgttcaggctcctcacgggtcaggagaccccgctgtacatctaggccaccccagcctggccacgcagccaggacaccgggcagggccgcccgggcccagaggagctgggagccgggccgcagacttgaccccgacgccacagcccagccacggacgctggctccccaaagggtgtgccctcaccacccacttgatttttttcattttgccaaaaaggggtatgtctttatcaaaggagagtcacagaacaaatgtttgtttgtaaagcgttccaagtattttgccacgttctggactgtcttctccctgcacaagccagggtgtgtctcggtagctgtgcgtggtgtggagtgtgtgtctttcctccctgaagctgtgcggagcgaactggcgcctccgagggacgcggctcccggggcagggcagccgtcacccctgcctcccgcccccttggctgggacgtctggggtcctgtggggcccccacaatggtcccaaacagctgcctctgccactgactgcagggacacgggcagcctggctcccaggacacgacttgtaatgaaagtttggggacatgtgattgattgattgattgattgtaaataaaggatgatggccacaacatgaaaactccatatttatttagatgctattattactgtttggacttttattttggcaggcttttttccagactctagggttttccaatgtgactaatgaccacacctgcctctcccgtcgtctcttctgggcaccctcccacccggctgcatacccggccagggctcccacagagacaagganggcacaggtgtctgccccctctttaaaatcgatctacacacatccacgcacatgcgaccccgagggaaacgaaacccactctagaaaacgcgaccttggccgcacctaaagcagccagccgtgagtgcagaccccttggccagcgtggcgcagtggccctgagcagtagtggcatgtgtgtagatcaagtcggatctagtccagctcggttcattagcgatccatgtaatctgacgtcatcttgtctcgaagtctctttttttggcccaggccttgaagaatacactgtgacttaagaagccttaccacgcagtaactaaagctttaggatgactgtattcgaggagtgccgtgtgttgcatgcagctacccgtaggaagacttcgcgcatatcactaataaacctgaagtcgtgatgacc

SEQ ID NO: 683 - protein, 749 aa, Homo sapien [sequence omitted]

SEQ ID NO: 684 - DNA, 421 bp, Homo sapien
tttttgcaaccaacatggttctattaaaaactctctttgactatggcattcaaggacagcaatacaatcttttttttttttaacaaagcaactaatataaaaatctgcaaatgccatatattcatatctaggctattcttctcatataggcatgtcattagatagactttctttctattctttcctgaggtatttttttgtggtttacttttattgtactgctggatgcattatttttgatcatcctttcctaaaatgatttaaagacctgcaaataattttattgcataggacactattgatgacacatagaatgggagctgcaagtatgtggcattggaacaagccttacaaatattgcattttaagaatacacacattttttacagtttgtctcttttaaaaaatttgaagttatagc

SEQ ID NO: 685 - DNA, 4643 bp, Homo sapien
cctactctattcagatattctccagattcctaaagattagagatcatttctcattctcctaggagtactcacttcaggaagcaaccagataaaagagaggtgcaacggaagccagaacattcctcctggaaattcaacctgtttcgcagtttctcgaggaatcagcattcagtcaatccgggccgggagcagtcatctgtggtgaggctgattggctgggcaggaacagcgccggggcgtgggctgagcacagcgcttcgctctctttgccacaggaagcctgagctcattcgagtagcggctcttccaagctcaaagaagcagaggccgctgttcgtttcctttaggtctttccactaaagtcggagtatcttcttccaagatttcacgtcttggtggccgttccaaggagcgcgaggtcgggatggatcttgaaggggaccgcaatggaggagcaaagaagaagaacttttttaaactgaacaataaaagtgaaaaagataagaaggaaaagaaaccaactgtcagtgtattttcaatgtttcgctattcaaattggcttgacaagttgtatatggtggtgggaactttggctgccatcatccatggggctggacttcctctcatgatgctggtgtttggagaaatgacagatatctttgcaaatgcaggaaatttagaagatctgatgtcaaacatcactaatagaagtgatatcaatgatacagggttcttcatgaatctggaggaagacatgaccaggtatgcctattattacagtggaattggtgctggggtgctggttgctgcttacattcaggtttcattttggtgcctggcagctggaagacaaatacacaaaattagaaaacagttttttcatgctataatgcgacaggagataggctggtttgatgtgcacgatgttggggagcttaacacccgacttacagatgatgtctccaagattaatgaaggaattggtgacaaaattggaatgttctttcagtcaatggcaacatttttcactgggtttatagtaggatttacacgtggttggaagctaacccttgtgattttggccatcagtcctgttcttggactgtcagctgctgtctgggcaaagatactatcttcatttactgataaagaactcttagcgtatgcaaaagctggagcagtagctgaagaggtcttggcagcaattagaactgtgattgcatttggaggacaaaagaaagaacttgaaaggtacaacaaaaatttagaagaagctaaaagaattgggataaagaaagctattacagccaatatttctataggtgctgctttcctgctgatctatgcatcttatgctctggccttctggtatgggaccaccttggtcctctcaggggaatattctattggacaagtactcactgtattttctgtattaattggggcttttagtgttggacaggcatctccaagcattgaagcatttgcaaatgcaagaggagcagcttatgaaatcttcaagataattgataataagccaagtattgacagctattcgaagagtgggcacaaaccagataatattaagggaaatttggaattcagaaatgttcacttcagttacccatctcgaaaagaagttaagatcttgaagggtctgaacctgaaggtgcagagtgggcagacggtggccctggttggaaacagtggctgtgggaagagcacaacagtccagctgatgcagaggctctatgaccccacagaggggatggtcagtgttgatggacaggatattaggaccataaatgtaaggtttctacgggaaatcattggtgtggtgagtcaggaacctgtattgtttgccaccacgatagctgaaaacattcgctatggccgtgaaaatgtcaccatggatgagattgagaaagctgtcaaggaagccaatgcctatgactttatcatgaaactgcctcataaatttgacaccctggttggagagagaggggcccagttgagtggtgggcagaagcagaggatcgccattgcacgtgccctggttcgcaaccccaagatcctcctgctggatgaggccacgtcagccttggacacagaaagcgaagcagtggttcaggtggctctggataaggccagaaaaggtcggaccaccattgtgatagctcatcgtttgtctacagttcgtaatgctgacgtcatcgctggtttcgatgatggagtcattgtggagaaaggaaatcatgatgaactcatgaaagagaaaggcatttacttcaaacttgtcacaatgcagacagcaggaaatgaagttgaattagaaaatgcagctgatgaatccaaaagtgaaattgatgccttggaaatgtcttcaaatgattcaagatccagtctaataagaaaaagatcaactcgtaggagtgtccgtggatcacaagcccaagacagaaagcttagtaccaaagaggctctggatgaaagtatacctccagtttccttttggaggattatgaagctaaatttaactgaatggccttattttgttgttggtgtattttgtgccattataaatggaggcctgcaaccagcatttgcaataatattttcaaagattataggggtttttacaagaattgatgatcctgaaacaaaacgacagaatagtaacttgttttcactattgtttctagcccttggaattatttcttttattacatttttccttcagggtttcacatttggcaaagctggagagatcctcaccaagcggctccgatacatggttttccgatccatgctcagacaggatgtgagttggtttgatgaccctaaaaacaccactggagcattgactaccaggctcgccaatgatgctgctcaagttaaaggggctataggttccaggcttgctgtaattacccagaatatagcaaatcttgggacaggaataattatatccttcatctatggttggcaactaacactgttactcttagcaattgtacccatcattgcaatagcaggagttgttgaaatgaaaatgttgtctggacaagcactgaaagataagaaagaactagaaggtgctgggaagatcgctactgaagcaatagaaaacttccgaaccgttgtttctttgactcaggagcagaagtttgaacatatgtatgctcagagtttgcaggtaccatacagaaactctttgaggaaagcacacatctttggaattacattttccttcacccaggcaatgatgtatttttcctatgctggatgtttccggtttggagcctacttggtggcacataaactcatgagctttgaggatgttctgttagtattttcagctgttgtctttggtgccatggccgtggggcaagtcagttcatttgctcctgactatgccaaagccaaaatatcagcagcccacatcatcatgatcattgaaaaaacccctttgattgacagctacagcacggaaggcctaatgccgaacacattggaaggaaatgtcacatttggtgaagttgtattcaactatcccacccgaccggacatcccagtgcttcagggactgagcctggaggtgaagaagggccagacgctggctctggtgggcagcagtggctgtgggaagagcacagtggtccagctcctggagcggttctacgaccccttggcagggaaagtgctgcttgatggcaaagaaataaagcgactgaatgttcagtggctccgagcacacctgggcatcgtgtcccaggagcccatcctgtttgactgcagcattgctgagaacattgcctatggagacaacagccgggtggtgtcacaggaagagattgtgagggcagcaaaggaggccaacatacatgccttcatcgagtcactgcctaataaatatagcactaaagtaggagacaaaggaactcagctctctggtggccagaaacaacgcattgccatagctcgtgcccttgttagacagcctcatattttgcttttggatgaagccacgtcagctctggatacagaaagtgaaaaggttgtccaagaagccctggacaaagccagagaaggccgcacctgcattgtgattgctcaccgcctgtccaccatccagaatgcagacttaatagtggtgtttcagaatggcagagtcaaggagcatggcacgcatcagcagctgctggcacagaaaggcatctatttttcaatggtcagtgtccaggctggaacaaagcgccagtgaactctgactgtatgagatgttaaatactttttaatatttgtttagatatgacatttattcaaagttaaaagcaaacacttacagaattatgaagaggtatctgtttaacatttcctcagtcaagttcagagtcttcagagacttcgtaattaaaggaacagagtgagagacatcatcaagtggagagaaatcatagtttaaactgcattataaattttataacagaattaaagtagattttaaaagataaaatgtgtaattttgtttatattttcccatttggactgtaactgactgccttgctaaaagattatagaagtagcaaaaagtattgaaatgtttgcataaagtgtctataataaaactaaactttcatgtg

SEQ ID NO: 686 - protein, 1279 aa, Homo sapien
MDLEGDRNGGAKKKNFFKLNNKSEKDKKEKKPTVSVFSMFRYSNWLDKLYMVVGTLAAIIHGAGLPLMMLVFGEMTDIFANAGNLEDLMSNITNRSDINDTGFFMNLEEDMTRYAYYYSGIGAGVLVAAYIQVSFWCLAAGRQIHKIRKQFFHAIMRQEIGWFDVHDVGELNTRLTDDVSKINEGIGDKIGMFFQSMATFFTGFIVGFTRGWKLTLVILAISPVLGLSAAVWAKILSSFTDKELLAYAKAGAVAEEVLAAIRTVIAFGGQKKELERYNKNLEEAKRIGIKKAITANISIGAAFLLIYASYALAFWYGTTLVLSGEYSIGQVLTVFSVLIGAFSVGQASPSIEAFANARGAAYEIFKIIDNKPSIDSYSKSGHKPDNIKGNLEFRNVHFSYPSRKEVKILKGLNLKVQSGQTVALVGNSGCGKSTTVQLMQRLYDPTEGMVSVDGQDIRTINVRFLREIIGVVSQEPVLFATTIAENIRYGRENVTMDEIEKAVKEANAYDFIMKLPHKFDTLVGERGAQLSGGQKQRIAIARALVRNPKILLLDEATSALDTESEAVVQVALDKARKGRTTIVIAHRLSTVRNADVIAGFDDGVIVEKGNHDELMKEKGIYFKLVTMQTAGNEVELENAADESKSEIDALEMSSNDSRSSLIRKRSTRRSVRGSQAQDRKLSTKEALDESIPPVSFWRIMKLNLTEWPYFVVGVFCAIINGGLQPAFAIIFSKIIGVFTRIDDPETKRQNSNLFSLLFLALGIISFITFFLQGFTFGKAGEILTKRLRYMVFRSMLRQDVSWFDDPKNTTGALTTRLANDAAQVKGAIGSRLAVITQNIANLGTGIIISFIYGWQLTLLLLAIVPIIAIAGVVEMKMLSGQALKDKKELEGAGKIATEAIENFRTVVSLTQEQKFEHMYAQSLQVPYRNSLRKAHIFGITFSFTQAMMYFSYAGCFRFGAYLVAHKLMSFEDVLLVFSAVVFGAMAVGQVSSFAPDYAKAKISAAHIIMIIEKTPLIDSYSTEGLMPNTLEGNVTFGEVVFNYPTRPDIPVLQGLSLEVKKGQTLALVGSSGCGKSTVVQLLERFYDPLAGKVLLDGKEIKRLNVQWLRAHLGIVSQEPILFDCSIAENIAYGDNSRVVSQEEIVRAAKEANIHAFIESLPNKYSTKVGDKGTQLSGGQKQRIAIARALVRQPHILLLDEATSALDTESEKVVQEALDKAREGRTCIVIAHRLSTIQNADLIVVFQNGRVKEHGTHQQLLAQKGIYFSMVSVQAGTKRQ

SEQ ID NO: 687 - DNA, 1216 bp, Homo sapien
ggcagctgcacggctcctggccccggagcatgcgcgagagccgccccggagcgccccggagccccccgccgtcccgcccgcggcgtcccgcgccccgccgccagcgcacccccggacgctatggcccacccctccggctggccccttctgtaggatggtagcacacaaccaggtggcagccgacaatgcagtctccacagcagcagagccccgacggcggccagaaccttcctcctcttcctcctcctcgcccgcggcccccgcgcgcccgcggccgtgccccgcggtcccggccccggcccccggcgacacgcacttccgcacattccgttcgcacgccgattaccggcgcatcacgcgcgccagcgcgctcctggacgcctgcggattctactgggggcccctgagcgtgcacggggcgcacgagcggctgcgcgccgagcccgtgggcaccttcctggtgcgcgacagccgccagcggaactgctttttcgcccttagcgtgaagatggcctcgggacccacgagcatccgcgtgcactttcaggccggccgctttcacctggatggcagccgcgagagcttcgactgcctcttcgagctgctggagcactacgtggcggcgccgcgccgcatgctgggggccccgctgcgccagcgccgcgtgcggccgctgcaggagctgtgccgccagcgcatcgtggccaccgtgggccgcgagaacctggctcgcatccccctcaaccccgtcctccgcgactacctgagctccttccccttccagatttgaccggcagcgcccgccgtgcacgcagcattaactgggatgccgtgttattttgttattacttgcctggaaccatgtgggtaccctccccggcctgggttggagggagcggatgggtgtaggggcgaggcgcctcccgccctcggctggagacgaggccgcagaccccttctcacctcttgagggggtcctccccctcctggtgctccctctgggtccccctggttgttgtagcagcttaactgtatctggagccaggacctgaactcgcacctcctacctcttcatgtttacatatacccagtatctttgcacaaaccaggggttgggggagggtctctggctttatttttctgctgtgcagaatcctattttatattttttaaagtcagtttaggtaataaactttattatgaaagtttttttttt

SEQ ID NO: 688 - protein, 211 aa, Homo sapien
MVAHNQVAADNAVSTAAEPRRRPEPSSSSSSSPAAPARPRPCPAVPAPAPGDTHFRTFRSHADYRRITRASALLDACGFYWGPLSVHGAHERLRAEPVGTFLVRDSRQRNCFFALSVKMASGPTSIRVHFQAGRFHLDGSRESFDCLFELLEHYVAAPRRMLGAPLRQRRVRPLQELCRQRIVATVGRENLARIPLNPVLRDYLSSFPFQI

SEQ ID NO: 689 - DNA, 1216 bp, Homo sapien; identical to SEQ ID NO: 687

SEQ ID NO: 690 - protein, 211 aa, Homo sapien; identical to SEQ ID NO: 688

SEQ ID NO: 691 - DNA, 5068 bp, Homo sapien
atggctggcggagcctggggccgcctggcctgttacttggagttcctgaagaaggaggagctgaaggagttccagcttctgctcgccaataaagcgcactccaggagctcttcgggtgagacacccgctcagccagagaagacgagtggcatggaggtggcctcgtacctggtggctcagtatggggagcagcgggcctgggacctagccctccatacctgggagcagatggggctgaggtcactgtgcgcccaagcccaggaaggggcaggccactctccctcattcccctacagcccaagtgaaccccacctggggtctcccagccaacccacctccaccgcagtgctaatgccctggatccatgaattgccggcggggtgcacccagggctcagagagaagggttttgagacagctgcctgacacatctggacgccgctggagagaaatctctgcctcactcctctaccaagctcttccaagctccccagaccatgagtctccaagccaggagtcacccaacgcccccacatccacagcagtgctggggagctggggatccccacctcagcccagcctagcacccagagagcaggaggctcctgggacccaatggcctctggatgaaacgtcaggaatttactacacagaaatcagagaaagagagagagagaaatcagagaaaggcaggcccccatgggcagcggtggtaggaacgcccccacaggcgcacaccagcctacagccccaccaccacccatgggagccttctgtgagagagagcctctgttccacatggccctggaaaaatgaggattttaaccaaaaattcacacagctgctacttctacaaagacctcaccccagaagccaagatcccctggtcaagagaagctggcctgattatgtggaggagaatcgaggacatttaattgagatcagagacttatttggcccaggcctggatacccaagaacctcgcatagtcatactgcagggggctgctggaattgggaagtcaacactggccaggcaggtgaaggaagcctgggggagaggccagctgtatggggaccgcttccagcatgtcttctacttcagctgcagagagctggcccagtccaaggtggtgagtctcgctgagctcatcggaaaagatgggacagccactccggctcccattagacagatcctgtctaggccagagcggctgctcttcatcctcgatggtgtagatgagccaggatgggtcttgcaggagccgagttctgagctctgtctgcactggagccagccacagccggcggatgcactgctgggcagtttgctggggaaaactatacttcccgaggcatccttcctgatcacggctcggaccacagctctgcagaacctcattccttctttggagcaggcacgttgggtagaggtcctggggttctctgagtccagcaggaaggaatatttctacagatatttcacagatgaaaggcaagcaattagagcctttaggttggtcaaatcaaacaaagagctctgggccctgtgtcttgtgccctgggtgtcctggctggcctgcacttgcctgatgcagcagatgaagcggaaggaaaaactcacactgacttccaagaccaccacaaccctctgtctacattaccttgcccaggctctccaagctcagccattgggaccccagctcagagacctctgctctctggctgctgagggcatctggcaaaaaaagacccttttcagtccagatgacctcaggaagcatgggttagatggggccatcatctccaccttcttgaagatgggtattcttcaagagcaccccatccctctgagctacagcttcattcacctctgtttccaagagttctttgcagcaatgtcctatgtcttggaggatgagaaggggagaggtaaacattctaattgcatcatagatttggaaaagacgctagaagcatatggaatacatggcctgtttggggcatcaaccacacgtttcctattgggcctgttaagtgatgagggggagagagagatggagaacatctttcactgccggctgtctcaggggaggaacctgatgcagtgggtcccgtccctgcagctgctgctgcagccacactctctggagtccctccactgcttgtacgagactcggaacaaaacgttcctgacacaagtgatggcccatttcgaagaaatgggcatgtgtgtagaaacagacatggagctcttagtgtgcactttctgcattaaattcagccgccacgtgaagaagcttcagctgattgagggcaggcagcacagatcaacatggagccccaccatggtagtcctgttcaggtgggtcccagtcacagatgcctattggcagattctcttctccgtcctcaaggtcaccagaaacctgaaggagctggacctaagtggaaactcgctgagccactctgcagtgaagagtctttgtaagaccctgagacgccctcgctgcctcctggagaccctgcggttggctggctgtggcctcacagctgaggactgcaaggaccttgcctttgggctgagagccaaccagaccctgaccgagctggacctgagcttcaatgtgctcacggatgctggagccaaacacctttgccagagactgagacagccgagctgcaagctacagcgactgcagctggtcagctgtggcctcacgtctgactgctgccaggacctggcctctgtgcttagtgccagccccagcctgaaggagctagacctgcagcagaacaacctggatgacgttggcgtgcgactgctctgtgaggggctcaggcatcctgcctgcaaactcatacgcctggggctggaccagacaactctgagtgatgagatgaggcaggaactgagggccctggagcaggagaaacctcagctgctcatcttcagcagacggaaaccaagtgtgatgacccctactgagggcctggatacgggagagatgagtaatagcacatcctcactcaagcggcagagactcggatcagagagggcggcttcccatgttgctcaggctaatctcaaactcctggacgtgagcaagatcttcccaattgctgagattgcagaggaaagctccccagaggtagtaccggtggaactcttgtgcgtgccttctcctgcctctcaaggggacctgcatacgaagcctttggggactgacgatgacttctggggccccacggggcctgtggctactgaggtagttgacaaagaaaagaacttgtaccgagttcacttccctgtagctggctcctaccgctggcccaacacgggtctctgctttgtgatgagagaagcggtgaccgttgagattgaattctgtgtgtgggaccagttcctgggtgagatcaacccacagcacagctggatggtggcagggcctctgctggacatcaaggctgagcctggagctgtggaagctgtgcacctccctcactttgtggctctccaagggggccatgtggacacatccctgttccaaatggcccactttaaagaggaggggatgctcctggagaagccagccagggtggagctgcatcacatagttctggaaaaccccagcttctcccccttgggagtcctcctgaaaatgatccataatgccctgcgcttcattcccgtcacctctgtggtgttgctttaccaccgcgtccatcctgaggaagtcaccttccacctctacctgatcccaagtgactgctccattcggaaggccatagatgatctagaaatgaaattccagtttgtgcgaatccacaagccacccccgctgaccccactttatatgggctgtcgttacactgtgtctgggtctggttcagggatgctggaaatactccccaaggaactggagctctgctatcgaagccctggagaagaccagctgttctcggagttctacgttggccacttgggatcagggatcaggctgcaagtgaaagacaagaaagatgagactctggtgtgggaggccttggtgaaaccaggagatctcatgcctgcaactactctgatccctccagcccgcatagccgtaccttcacctctggatgccccgcagttgctgcactttgtggaccagtatcgagagcagctgatagcccgagtgacatcggtggaggttgtcttggacaaactgcatggacaggtgctgagccaggagcagtacgagagggtgctggctgagaacacgaggcccagccagatgcggaagctgttcagcttgagccagtcctgggaccggaagtgcaaagatggactctaccaagccctgaaggagacccatcctcacctcattatggaactctgggagaagggcagcaaaaagggactcctgccactcagcagctgaagtatcaacaccagcccttgacccttgagtcctggctttggctgacccttctttgggtctcagtttctttctctgcaaacaagttgccatctggtttgccttccagcactaaagtaatggaactttgatgatgcctttgctgggcattatgtgtccatgccagggatgccacagggggccccagtccaggtggcctaacagcatctcagggaatgtccatctggagctggcaagacccctgcagacctcatagagcctcatctggtggccacagcagccaagcctagagccctccggatcccatccaggcgcaaagaggaataggagggacatggaaccatttgcctctggctgtgtcacagggtgagccccaaaattggggttcagcgtgggaggccacgtggattcttggctttgtacaggaagatctacaagagcaagccaacagagtaaagtggaaggaagtttattcagaaaataaaggagtatcacagctcttttagaatttgtctagcaggctttccagtttttaccagaaaacccctataaattaaaaattttttacttaaatttaagaattaaaaaaatacaaaaaagaaaaaatgaaaataaaggaataagaagttacctactccaaaaaaaaaaa

SEQ ID NO: 692 - protein, 1473 aa, Homo sapien
MAGGAWGRLACYLEFLKKEELKEFQLLLANKAHSRSSSGETPAQPEKTSGMEVASYLVAQYGEQRAWDLALHTWEQMGLRSLCAQAQEGAGHSPSFPYSPSEPHLGSPSQPTSTAVLMPWIHELPAGCTQGSERRVLRQLPDTSGRRWREISASLLYQALPSSPDHESPSQESPNAPTSTAVLGSWGSPPQPSLAPREQEAPGTQWPLDETSGIYYTEIREREREKSEKGRPPWAAVVGTPPQAHTSLQPHHHPWEPSVRESLCSTWPWKNEDFNQKFTQLLLLQRPHPRSQDPLVKRSWPDYVEENRGHLIEIRDLFGPGLDTQEPRIVILQGAAGIGKSTLARQVKEAWGRGQLYGDRFQHVFYFSCRELAQSKVVSLAELIGKDGTATPAPIRQILSRPERLLFILDGVDEPGWVLQEPSSELCLHWSQPQPADALLGSLLGKTILPEASFLITARTTALQNLIPSLEQARWVEVLGFSESSRKEYFYRYFTDERQAIRAFRLVKSNKELWALCLVPWVSWLACTCLMQQMKRKEKLTLTSKTTTTLCLHYLAQALQAQPLGPQLRDLCSLAAEGIWQKKTLFSPDDLRKHGLDGAIISTFLKMGILQEHPIPLSYSFIHLCFQEFFAAMSYVLEDEKGRGKHSNCIIDLEKTLEAYGIHGLFGASTTRFLLGLLSDEGEREMENIFHCRLSQGRNLMQWVPSLQLLLQPHSLESLHCLYETRNKTFLTQVMAHFEEMGMCVETDMELLVCTFCIKFSRHVKKLQLIEGRQHRSTWSPTMVVLFRWVPVTDAYWQILFSVLKVTRNLKELDLSGNSLSHSAVKSLCKTLRRPRCLLETLRLAGCGLTAEDCKDLAFGLRANQTLTELDLSFNVLTDAGAKHLCQRLRQPSCKLQRLQLVSCGLTSDCCQDLASVLSASPSLKELDLQQNNLDDVGVRLLCEGLRHPACKLIRLGLDQTTLSDEMRQELRALEQEKPQLLIFSRRKPSVMTPTEGLDTGEMSNSTSSLKRQRLGSERAASHVAQANLKLLDVSKIFPIAEIAEESSPEVVPVELLCVPSPASQGDLHTKPLGTDDDFWGPTGPVATEVVDKEKNLYRVHFPVAGSYRWPNTGLCFVMREAVTVEIEFCVWDQFLGEINPQHSWMVAGPLLDIKAEPGAVEAVHLPHFVALQGGHVDTSLFQMAHFKEEGMLLEKPARVELHHIVLENPSFSPLGVLLKMIHNALRFIPVTSVVLLYHRVHPEEVTFHLYLIPSDCSIRKAIDDLEMKFQFVRIHKPPPLTPLYMGCRYTVSGSGSGMLEILPKELELCYRSPGEDQLFSEFYVGHLGSGIRLQVKDKKDETLVWEALVKPGDLMPATTLIPPARIAVPSPLDAPQLLHFVDQYREQLIARVTSVEVVLDKLHGQVLSQEQYERVLAENTRPSQMRKLFSLSQSWDRKCKDGLYQALKETHPHLIMELWEKGSKKGLLPLSS

SEQ ID NO: 693 - DNA, 1280 bp, Homo sapien
cgcggcggcgcggagctcgggcggccgtggaggaactcagcctcggccgcaggaggcgccgggagcggagccgccgggagtcgcgcaacaggtttccttctccatccgtgcgcccacaggggacgcgcgccctgccgggagaggggcttctcggttcgcactctcgctcccagtccaggcaaaatgaaagaccggctagcagaacttctggacttgtccaagcaatatgaccagcagttcccagacggggacgatgagtttgactcgccccacgaggacatcgtgttcgagacggaccacatcctggagtccctgtaccgagacatccgggacattcaggatgaaaaccagctgctggtggccgacgtgaagcggctgggaaagcagaacgcccgcttcctcacgtccatgcggcgcctcagcagcatcaagcgcgacaccaactccatcgccaaggccttcagggcccggggcgaggtcatccactgcaagctgcgcgccatgaaggagctgagcgaggcggctgaggcccagcacggcccgcactcggcagtggcgcgcatttcgcgggcgcagtacaacgcgctcaccctcaccttccagcgcgccatgcacgactacaaccaggccgagatgaagcagcgcgacaactgcaagatccgcatccagcgccagctggagatcatgggcaaggaagtctcgggcgaccagatcgaggacatgttcgagcagggtaagtgggacgtgttttccgagaacttgctggccgacgtgaagggccgcgggccgcccacaacgagatcgagagccgccaccgcgaactgctgcgcctggagagccgccatccgcgacgtacacgagctcttcttgcagatggcggtgctggtggagaagcaggccgacaccctgaacgtcatcgagctcaacgtacaaaagacggtcgactacaccggccaggccaaggcgcaggtgcggaaggccgtgcagtacgaggagaagaacccctgccggaccctctgctgcttctgctgtccctgcctcaagtagcaggccggcccgggccgccaccgcccatcccagaccatggagcgcgctgggaaggacgcaccaaagccgggagctctgccctgcagggagttgccccaaccctttccggaactcagtctttagaaaagaaacgccaggttcaagaattgcaaaccagcctgtgcttggaaagatggttagttgataccgtccgatgattcttcagtaaagatagattcccacctcgtgccgaa

SEQ ID NO: 694 - protein, 287 aa, Homo sapien
MKDRLAELLDLSKQYDQQFPDGDDEFDSPHEDIVFETDHILESLYRDIRDIQDENQLLVADVKRLGKQNARFLTSMRRLSSIKRDTNSIAKAFRARGEVIHCKLRAMKELSEAAEAQHGPHSAVARISRAQYNALTLTFQRAMHDYNQAEMKQRDNCKIRIQRQLEIMGKEVSGDQIEDMFEQGKWDVFSENLLADVKGRGPPTTRSRAATANCCAWRAAIRDVHELFLQMAVLVEKQADTLNVIELNVQKTVDYTGQAKAQVRKAVQYEEKNPCRTLCCFCCPCLK

SEQ ID NO: 695 - DNA, 1893 bp, Homo sapien
agttccccgacatcaagtcacgcattgccaagcgggggcgcaagctggtggactacgacagtgcccggcaccactacgagtcccttcaaactgccaaaaagaaggatgaagccaaaattgccaagcctgtctcgctgcttgagaaagccgccccccagtggtgccaaggcaaactgcaggctcatctcgtagctcaaactaacctgctccgaaatcaggccgaggaggagctcatcaaagcccagaaggtgtttgaggagatgaatgtggatctgcaggaggagctgccgtccctgtggaacagccgcgtaggtttctatgtcaacacgttccagagcatcgcgggcctggaggaaaacttccacaaggagatgagcaagctcaaccagaacctcaatgatgtgctggtcggcctggagaagcaacacgggagcaacaccttcacggtcaaggcccagcccagtgacaacgcgcctgcaaaagggaacaagagcccttcgcctccagatggctcccctgccgccacccccgagatcagagtcaaccacgagccagagccggccggcggggccacgcccggggccaccctccccaagtccccatctcagctccggaaaggcccaccagtccctccgcctcccaaacacaccccgtccaaggaagtcaagcaggagcagatcctcagcctgtttgaggacacgtttgtccctgagatcagcgtgaccaccccctcccagtttgaggccccggggcctttctcggagcaggccagtctgctggacctggactttgaccccctcccgcccgtgacgagccctgtgaaggcacccacgccctctggtcagtcaattccatgggacctctgggagcccacagagagtccagccggcagcctgccttccggggagcccagcgctgccgagggcacctttgctgtgtcctggcccagccagacggccgagccggggcctgcccaaccagcagaggcctcggaggtggcgggtgggacccaacctgcggctggagcccaggagccaggggagacggcggcaagtgaagcagcctccagctctcttcctgctgtcgtggtggagaccttcccagcaactgtgaatggcaccgtggagggcggcagtggggccgggcgcttggacctgcccccaggtttcatgttcaaggtacaggcccagcacgactacacggccactgacacagacgagctgcagctcaaggctggtgatgtggtgctggtgatccccttccagaaccctgaagagcaggatgaaggctggctcatgggcgtgaaggagagcgactggaaccagcacaaggagctggagaagtgccgtggcgtcttccccgagaacttcactgagagggtcccatgacggcggggcccaggcagcctccgggcgtgtgaagaacacctcctcccgaaaaatgtgtggttcttttttttgttttgttttcgtttttcatcttttgaagagcaaagggaaatcaagaggagacccccaggcagaggggcgttctcccaaagattaggtcgttttccaaagagccgcgtcccggcaagtccggcggaattcaccagtgttcctgaagctgctgtgtcctctagttgagtttctggcgcccctgcctgtgcccgcatgtgtgcctggccgcagggcggggctgggggctgccgagccaccatgcttgcctgaagcttcggccgcgccacccgggcaagggtcctcttttcctggcagctgctgtgggtggggcccagacaccagcctagcctggctctgccccgcagacggtctgtgtgctgtttgaaaataaatcttagtgttcaaaacaaaatgaaacaaaaaaaaaatgaaaaaaaaaaaaaaaaaaaaaaaa

SEQ ID NO: 696 - DNA, 756 bp, Homo sapien
gctggaggatgtggctgcagagcctgctgctcttgggcactgtggcctgcagcatctctgcacccgcccgctcgcccagccccagcacgcagccctgggagcatgtgaatgccatccaggaggcccggcgtctcctgaacctgagtagagacactgctgctgagatgaatgaaacagtagaagtcatctcagaaatgtttgacctccaggagccgacctgcctacagacccgcctggagctgtacaagcagggcctgcggggcagcctcaccaagctcaagggccccttgaccatgatggccagccactacaagcagcactgccctccaaccccggaaacttcctgtgcaacccagactatcacctttgaaagtttcaaagagaacctgaaggactttctgcttgtcatcccctttgactgctgggagccagtccaggagtgagaccggccagatgaggctggccaagccggggagctgctctctcatgaaacaagagctagaaactcaggatggtcatcttggagggaccaaggggtgggccacagccatggtgggagtggcctggacctgccctgggccacactgaccctgatacaggcatggcagaagaatgggaatattttatactgacagaaatcagtaatatttatatatttatatttttaaaatatttatttatttatttatttaagttcatattccatatttattcaagatgttttaccgtaataattattattaaaaatatgcttct

SEQ ID NO: 697 - protein, 144 aa, Homo sapien [sequence omitted]

SEQ ID NO: 698 - DNA, 1242 bp, Homo sapien
agttacgttcggggcgtggccgggagcacgttggctccgccccctggcggctgcctcagcggcggcggcggcgcaggctcagagcagaccccgcccggcgaggaggagggagggccgccagtgtcgacatgctgctggaggaggttcgcgccggcgaccggctgagtggggcggcggcccggggcgacgtgcaggaggtgcgccgccttctgcaccgcgagctggtgcatcccgacgccctcaaccgcttcggcaagacggcgctgcaggtcatgatgtttggcagcaccgccatcgccctggagctgctgaagcaaggtgccagccccaatgtccaggacacctccggtaccagtccagtccatgacgcagcccgcactggattcctggacaccctgaaggtcctagtggagcacggggctgatgtcaacgtgcctgatggcaccggggcacttccaatccatctggcagttcaagagggtcacactgctgtggtcagctttctggcagctgaatctgatctccatcgcagggacgccaggggtctcacacccttggagctggcactgcagagaggggctcaggacctcgtggacatcctgcagggccacatggtggccccgctgtgatctggggtcaccctctccagcaagagaaccccgtggggttatgtatcagaagagaggggaagaaacactttctcttcttgtttctcctgcccactgctgcagtaggggaggagcacagtttgtggcttataggtgttggttttgggggtgtgagtgtttgggggacgtttctcatttgtttttctcactccttttggtgtgttggacagagaagggctcctgcaggccacagccacctaaacggttcagtttcttctgcgcctcaggctgctggggcctcagacgagacccaagggcagagcatttaagagtgaagtcatgacctccagggagcctagaagctggtggccttggccggctgtgctcagagacctgaagtgtgcacgttgcttcaggcatggggggtggggggagcgtcccaaatcaataagaaggtagaatgagttatgagttattcatattctgttggaagcttgttttccagtctcttgtacagcgttttaaaagaaatggattctatttattatgctttattggaaaaaatgttgtaataatttaatgtttttacccattaaattaagacttgtgcatgatcaaaaaaaaaaaaaaaaaa

SEQ ID NO: 699 - protein, 166 aa, Homo sapien
MLLEEVRAGDRLSGAAARGDVQEVRRLLHRELVHPDALNRFGKTALQVMMFGSTAIALELLKQGASPNVQDTSGTSPVHDAARTGFLDTLKVLVEHGADVNVPDGTGALPIHLAVQEGHTAVVSFLAAESDLHRRDARGLTPLELALQRGAQDLVDILQGHMVAPL

SEQ ID NO: 700 - DNA, 1350 bp, Homo sapien
ggggagatcttagctgaagatgactgacagtgttatttattccatgttagagttgcctacggcaacccaagcccagaatgactatggaccacagcaaaaatcttcctcttccaggccttcttgttcttgccttgtggcaatagctttggggcttctgactgcagttcttctgagtgtgctgctataccagtggatcctgtgccagggctccaactactccacttgtgccagctgtcctagctgcccagaccgctggatgaaatatggtaaccattgttattatttctcagtggaggaaaaggactggaattctagtctggaattctgcctagccagagactcacacctccttgtgataacggacaatcaggaaatgagcctgctccaagttttcctcagtgaggccttttgctggattggtctgaggaacaattctggctggaggtgggaagatggatcacctctaaacttctcaaggatttcttctaatagctttgtgcagacatgcggtgccatcaacaaaaatggtcttcaagcctcaagctgtgaagttcctttacactgggtgtgtaagaagtgtccctttgcagatcaagctttattctgaagaataaacctagctggcatgctggtgtgtacctgtagtcctagctatttgggaagctgaggtgggagggtcgcttgagcccaggagtttgaggctgcagtgagctatgattgtgccactgtactccagcctgggagatagagcaagactccatctctaaaaaaaaaaaaaaatgctaatgtgagaatataaattgtgggaaatgagtgagggcaaggtggtacttcctccttctgagctcttcacacgtaatgcaaaaacccggtcttaactgattttgttttttttctgagtatgcatatatgtggttgaatgaaccaatgtgtgattgtatcttttccattatgtgactgtttgacctgcatattaatttcaagatagcagtcaattcgataaggcattttcatagaggaaagtttacagaaacagtttatgtggttggatcaccaaattatcttaggtactaaggcctcaaaaataagaaaaactttattatttctcctcagtagagtttggacatacataaggagagaaggtacagtgatgaaggagaccataattctgtagtgttgatgatcctggattataatctttttctctttatctttcatagtttttttaaaaacatggactgtatcttatctaccactatatcccaaatacctaagatagtgcttacgttcagtgactattaaataaataaatggatgaattaaaaaaaaaaaaaaaaaaaaaaaaaaaaa

SEQ ID NO: 701 - protein, 195 aa, Homo sapien
MTDSVIYSMLELPTATQAQNDYGPQQKSSSSRPSCSCLVAIALGLLTAVLLSVLLYQWILCQGSNYSTCASCPSCPDRWMKYGNHCYYFSVEEKDWNSSLEFCLARDSHLLVITDNQEMSLLQVFLSEAFCWIGLRNNSGWRWEDGSPLNFSRISSNSFVQTCGAINKNGLQASSCEVPLHWVCKKCPFADQALF

SEQ ID NO: 702 - DNA, 1193 bp, Homo sapien
tgaagatcagctattagaagagaaagatcagttaagtcctttggacctgatcagcttgatacaagaactactgatttcaacttctttggcttaattctctcggaaacgatgaaatatacaagttatatcttggcttttcagctctgcatcgttttgggttctcttggctgttactgccaggacccatatgtaaaagaagcagaaaaccttaagaaatattttaatgcaggtcattcagatgtagcggataatggaactcttttcttaggcattttgaagaattggaaagaggagagtgacagaaaaataatgcagagccaaattgtctccttttacttcaaactttttaaaaactttaaagatgaccagagcatccaaaagagtgtggagaccatcaaggaagacatgaatgtcaagtttttcaatagcaacaaaaagaaacgagatgacttcgaaaagctgactaattattcggtaactgacttgaatgtccaacgcaaagcaatacatgaactcatccaagtgatggctgaactgtcgccagcagctaaaacagggaagcgaaaaaggagtcagatgctgtttcaaggtcgaagagcatcccagtaatggttgtcctgcctgcaatatttgaattttaaatctaaatctatttattaatatttaacattatttatatggggaatatatttttagactcatcaatcaaataagtatttataatagcaacttttgtgtaatgaaaatgaatatctattaatatatgtattatttataattcctatatcctgtgactgtctcacttaatcctttgttttctgactaattaggcaaggctatgtgattacaaggctttatctcaggggccaactaggcagccaacctaagcaagatcccatgggttgtgtgtttatttcacttgatgatacaatgaacacttataagtgaagtgatactatccagttactgccggtttgaaaatatgcctgcaatctgagccagtgctttaatggcatgtcagacagaacttgaatgtgtcaggtgaccctgatgaaaacatagcatctcaggagatttcatgcctggtgcttccaaatattgttgacaactgtgactgtacccaaatggaaagtaactcatttgttaaaattatcaatatctaatatatatgaataaagtgtaagttcacaact

SEQ ID NO: 703 - protein, 166 aa, Homo sapien
MKYTSYILAFQLCIVLGSLGCYCQDPYVKEAENLKKYFNAGHSDVADNGTLFLGILKNWKEESDRKIMQSQIVSFYFKLFKNFKDDQSIQKSVETIKEDMNVKFFNSNKKKRDDFEKLTNYSVTDLNVQRKAIHELIQVMAELSPAAKTGKRKRSQMLFQGRRASQ

SEQ ID NO: 704 - DNA, 2089 bp, Homo sapien
gtttgagcagcattgttagagcctgtggaaaacactttacaactgtgtaactgtcttcatctttacagaggaatagtctacaaaggaagacttgtaacctggagaagagacctgtcatttactccatcctttatagtgatgctacaggacgaagaggaatggataaaaacattggcgagcaactcaataaagcgtatgaagccttccggcaggcatgcatggatagagattctgcagtaaaagaattacagcaaaagactgagaactatgagcagagaatacgtgaacaacaggaacagctgtcacttcaacagactattattgacaagctaaaatctcagttacttcttgtgaattccactcaagataacaattatggctgtgttcctctgcttgaagacagtgaaacaagaaagaataatttgactcttgatcagccacaagataaagtgatttcaggaatagcaagagaaaaactaccaaaggtaagaagacaagaggtttcttctcctagaaaagaaacttcagcaaggagtcttggcagtcctttgctccatgaaaggggtaatatagagaagactttctgggatctgaaagaagaatttcataaaatatgcatgctagcaaaagcacagaaagaccacttaagcaaacttaatataccagacactgcaactgaaacacagtgctctgtgcctatacagtgtacggataaaacagataaacaagaagcgctgtttaagcctcaggctaaagatgatataaatagaggtgcaccatccatcacatctgtcacaccaagaggactgtgcagagatgaggaagacacctcttttgaatcactttctaaattcaatgtcaagtttccacctatggacaatgactcaactttcttacatagcactccagagagacccggcatccttagtcctgccacgtctgaggcagtgtgccaagagaaatttaatatggagttcagagacaacccagggaactttgttaaaacagaagaaactttatttgaaattcagggaattgaccccatagcttcagctatacaaaaccttaaaacaactgacaaaacaaagccctcaaatctcgtaaacacttgtatcaggacaactctggatagagctgcgtgtttgccacctggagaccataatgcattatatgtaaatagcttcccacttctggacccatctgatgcaccttttccctcactcgattccccgggaaaagcaatccgaggaccacagcagcccatttggaagccctttcctaatcaagacagtgactcggtggtactaagtggcacagactcagaactgcatatacctcgagtatgtgaattctgtcaagcagttttcccaccatccattacatccaggggggatttccttcggcatcttaattcacacttcaatggagagacttaagacacatttgaaaacagacatatcaagttctatgtgatgattttgggtttttaatactataaatacttgattgtaaactaaattcaagatcatttataggaaaatctagtttcacagctatttgaatttttttctggatttactatataactcttattttttaaaagatcattctgttctttcaaggagaaataagcctaaaagaagaaaaacaaaaaaaattctgtataaaactgtaatcctttgtattcatgtttacagtgctattactataattcaaaattatgtatgtgacttagagttatataatcataatttatgtttatttcaaatatctaagtttattgcttggatttctagtgagagctgttgaatttggtgatgtcaaatgtttctagggtttttttagtttgtttttattgaaaaatttaattatttatgctataggtgatattctctttgaataaacctataatagaaaatagcagacaacataaacatctttgtaaatatcaaacctaatacatttcttgtccagtgataaaacaactggtagaattatttaaacactttagatttttaaataatatacatggctttaatttttactgtgtgtatagctacatgatgaaattaattaaatattaagaggt

SEQ ID NO: 705 - protein, 119 aa, Homo sapien
MDKNIGEQLNKAYEAFRQACMDRDSAVKELQQKTENYEQRIREQQEQLSLQQTIIDKLKSQLLLVNSTQDNNYGCVPLLEDSETRKNNLTLDQPQDKVISGIAREKLPKVDIASAESSI

SEQ ID NO: 706 - DNA, 2662 bp, Homo sapien
gtctacaccagcggtgtcgctgcccgaaagtgagagaaggctgatattgctagctggaatccaggcctgggtgctgcatggtggcgcccctccccgtgaccaccgctgcgttttctcgggctttctctgaggagctgctcttgtgctgtttggcccctgcctactcggaatggaacaaagcatcgaacaaacaactgagatcctgttgtgcctatcacctgttgaagttgccagtcttaaggaaggaatcaatttctttcgcaataagagcactggcaaagactacgtcttgtacaagaataagagccgactgagggcatgcaagaatatgtgcaagcaccaaggaggcctgttcataaaagatatcgaggatttagccggaagttgttgaaatggatgaaaacaacggacttttgcttttagaactgaatcctcctaacccttgggacttacagcccagatctcctgaagagttggcttttggagaagtacagataacatatctcactcatgcctgcatggacctcaagttaggagacaagagaatggtgtttgacccttggttaatcggtcctgcttttgcccgtggatggtggttgctccatgagcctccatctgattggctggagaggctgtgccaggcagacctcatttacatcagtcatctgcactcagaccacctgagttaccccacactgaaaaagcttgctgggagaagaccagatattcccatttatgttggaaacacagaaaggcctgtattttggaatctgaatcagagcggtgtccagttgactaatatcaatgtcgtgccatttggaatatggcagcaggtggacaaaaatcttcgattcatgatcttgatggacggtgttcatcctgagatggacacttgcattattgtggagtacaaaggtcataaaatactcaatatagtagactgcaccagacccaatgggggaaggctgcctatgaaggttgctctaatgatgagtgattttgctggaggagcatcaggctttccaatgactttcagtggtggaaaatttacggaggaatggaaagcccaattcattaaaacagaaaggaagaagctcctgaactacaaggctcggctggtgaagaacctgcaaccccgaatttattgtccctttgctgggtattttgtggaatctcacccatcagacaagtacatcaaggaaacaaacaccaaaaatgacccaaatgaactcaacaatcttatcaagaaaaactctgatgtgataacatggacccctcgaccgggagccacccttgatctgggaagaatgctgaaggatcgaacagacagcaagggcatcatagagcctccagaggggacaaaaatttacaaggattcctgggattttgaaccttatttggaaatcttgaatgctgctctaggagatgaaatatttcttcactcatcctggataaaagaatacttcacttgggctggatttaaagattacaaccttgtggtcaggatgattgagacagatgaggacttcaatccttttcctggaggatatgactatttggttgactttttagatttatccttcccaaaagaaagaccacaacgagaacatccctatgaggaaatccatagccgggtggatgtcatcagacacgtggtgaagaatggtctactctgggatgagttgtatataggattccaaacacggctccagcgggatcctgacatataccatcacctgttttggaatcattttcaaataaaactccccctcacaccacccaactggaagtcattcctgatgtgctgtgagcagaatgggcctgcgattttgcaagaatgcaaaaccacatgaaaatttcaagaattcactgatctgatgcaaaataaaaatttatcattacatcttgaacccaggaagcttacagcaaagagactatgctttatgacgtcagcaatagataattccacgttgcctttgtgatttgtatatatagcttacatttgtggatcactacatagccagattcaaaaatattttacttgttccatccacagttctctacagaaagaaccaatgaacccaataggaacaaattctctgtggaaaacaaagcatagctgtagtagatacgaatccaatcacagaggaaacaggaagagaaaaacatccaagactacagtgaaaactggaaatggtctgttttcgtgatattcgtatgattaagatgcaaattttttcttaggaaaatgtgattgttaactagcattctgttttacatgttgacatttctaacacacacaccactgatttgaacttcaaaatttattttctgattatatatgctaggtctgattctgaagatacaagaattcaatggtggaatttgtctcctgaaatttctagattcataattagaagtgtttattaccaacttctcacttagattaacatcagtgatgtttgattattctggttaaccgctcacatgcataacaataatgctagaaattcaggaattataattttgtgatttatactgtgtggtaaattattcagttctcactgcaaataaatataatgtatatcaatgtaatgtaggtcagaatgtctatggtgagcaaataaaagattattttaaaatatgaaaaaaaaaaaaaaaa

SEQ ID NO: 707 - protein, 486 aa, Homo sapien
MDENNGLLLLELNPPNPWDLQPRSPEELAFGEVQITYLTHACMDLKLGDKRMVFDPWLIGPAFARGWWLLHEPPSDWLERLCQADLIYISHLHSDHLSYPTLKKLAGRRPDIPIYVGNTERPVFWNLNQSGVQLTNINVVPFGIWQQVDKNLRFMILMDGVHPEMDTCIIVEYKGHKILNIVDCTRPNGGRLPMKVALMMSDFAGGASGFPMTFSGGKFTEEWKAQFIKTERKKLLNYKARLVKNLQPRIYCPFAGYFVESHPSDKYIKETNTKNDPNELNNLIKKNSDVITWTPRPGATLDLGRMLKDRTDSKGIIEPPEGTKIYKDSWDFEPYLEILNAALGDEIFLHSSWIKEYFTWAGFKDYNLVVRMIETDEDFNPFPGGYDYLVDFLDLSFPKERPQREHPYEEIHSRVDVIRHVVKNGLLWDELYIGFQTRLQRDPDIYHHLFWNHFQIKLPLTPPNWKSFLMCCEQNGPAILQECKTT

SEQ ID NO: 708 - DNA, 1080 bp, Homo sapien
ccggggggcatgagggtccgagacttgttcttctgtcccttccaagacccggcgacaggaggcatgaggggcccccggccgaaatgacagtgctggcgccagcctggagcccaacaacctatctcctcctgctgctgctgctgagctcgggactcagtgggacccaggactgctccttccaacacagccccatctcctccgacttcgctgtcaaaatccgtgagctgtctgactacctgcttcaagattacccagtcaccgtggcctccaacctgcaggacgaggagctctgcgggggcctctggcggctggtcctggcacagcgctggatggagcggctcaagactgtcgctgggtccaagatgcaaggcttgctggagcgcgtgaacacggagatacactttgtcaccaaatgtgcctttcagcccccccccagctgtcttcgcttcgtccagaccaacatctcccgcctcctgcaggagacctccgagcagctggtggcgctgaagccctggatcactcgccagaacttctcccggtgcctggagctgcagtgtcagcccgactcctcaaccctgccacccccatggagtccccggcccctggaggccacagccccgacagccccgcagccccctctgctcctcctactgctgctgcccgtgggcctcctgctgctggccgctgcctggtgcctgcactggcagaggacgcggcggaggacaccccgccctggggagcaggtgccccccgtccccagtccccaggacctgctgcttgtggagcactgacctggccaaggcctcatcctgcggagccttaaacaacgcagtgagacagacatctatcatcccattttacaggggaggatactgaggcacacagaggggagtcaccagccagaggatgtatagcctggacacagaggaagttggctagaggccggtcccttccttgggcccctctcattccctccccagaatggaggcaacgccagaatccagcaccggccccatttacccaactctgaacaaagcccttgcccccatgaaattgtttataaatcatccttttctccca

SEQ ID NO: 709 - protein, 235 aa, Homo sapien
MTVLAPAWSPTTYLLLLLLLSSGLSGTQDCSFQHSPISSDFAVKIRELSDYLLQDYPVTVASNLQDEELCGGLWRLVLAQRWMERLKTVAGSKMQGLLERVNTEIHFVTKCAFQPPPSCLRFVQTNISRLLQETSEQLVALKPWITRQNFSRCLELQCQPDSSTLPPPWSPRPLEATAPTAPQPPLLLLLLLPVGLLLLAAAWCLHWQRTRRRTPRPGEQVPPVPSPQDLLLVEH

SEQ ID NO: 710 - DNA, 1931 bp, Homo sapien
gcgcctggcctattgaaggtttttaatcttcagagtttcgactttatcaacaacacttagaagccaccaaagaattgcagatggatcctaatagaatatcagaagatggcactcactgcatttatagaattttgagactccatgaaaatgcagattttcaagacacaactctggagagtcaagatacaaaattaatacctgattcatgtaggagaattaaacaggcctttcaaggagctgtgcaaaaggaattacaacatatcgttggatcacagcacatcagagcagagaaagcgatggtggatggctcatggttagatctggccaagaggagcaagcttgaagctcagccttttgctcatctcactattaatgccaccgacatcccatctggttcccataaagtgagtctgtcctcttggtaccatgatcggggttgggccaagatctccaacatgacttttagcaatggaaaactaatagttaatcaggatggcttttattacctgtatgccaacatttgctttcgacatcatgaaacttcaggagacctagctacagagtatcttcaactaatggtgtacgtcactaaaaccagcatcaaaatcccaagttctcataccctgatgaaaggaggaagcaccaagtattggtcagggaattctgaattccatttttattccataaacgttggtggattttttaagttacggtctggagaggaaatcagcatcgaggtctccaacccctccttactggatccggatcaggatgcaacatactttggggcttttaaagttcgagatatagattgagccccagtttttggagtgttatgtatttcctggatgtttggaaacattttttaaaacaagccaagaaagatgtatataggtgtgtgagactactaagaggcatggccccaacggtacacgactcagtatccatgctcttgaccttgtagagaacacgcgtatttacagccagtgggagatgttagactcatggtgtgttacacaatggtttttaaattttgtaatgaattcctagaattaaaccagattggagcaattacgggttgaccttatgagaaactgcatgtgggctatgggaggggttggtccctggtcatgtgccccttcgcagctgaagtggagagggtgtcatctagcgcaattgaaggatcatctgaaggggcaaattcttttgaattgttacatcatgctggaacctgcaaaaaatactttttctaatgaggagagaaaatatatgtatttttatataatatctaaagttatatttcagatgtaatgttttctttgcaaagtattgtaaattatatttgtgctatagtatttgattcaaaatatttaaaaatgtcttgctgttgacatatttaatgttttaaatgtacagacatatttaactggtgcactttgtaaattccctggggaaaacttgcagctaaggaggggaaaaaaatgttgtttcctaatatcaaatgcagtatatttcttcgttctttttaagttaatagattttttcagacttgtcaagcctgtgcaaaaaaattaaaatggatgccttgaataataagcaggatgttggccaccaggtgcctttcaaatttagaaactaattgactttagaaagctgacattgccaaaaaggatacataatgggccactgaaatctgtcaagagtagttatataattgttgaacaggtgtttttccacaagtgccgcaaattgtaccttttttgttttttcaaaatagaaaagttattagtggtttatcagcaaaaaagtccaattttaatttagtaaatgttatcttatactgtacaataaaaacattgcctttgaatgttaattttttggtacaaaaataaatttatatgaaaacctgaaaaaaaaaaaaaaaaaaaaaa

SEQ ID NO: 711 - protein, 244 aa, Homo sapien
MDPNRISEDGTHCIYRILRLHENADFQDTTLESQDTKLIPDSCRRIKQAFQGAVQKELQHIVGSQHIRAEKAMVDGSWLDLAKRSKLEAQPFAHLTINATDIPSGSHKVSLSSWYHDRGWAKISNMTFSNGKLIVNQDGFYYLYANICFRHHETSGDLATEYLQLMVYVTKTSIKIPSSHTLMKGGSTKYWSGNSEFHFYSINVGGFFKLRSGEEISIEVSNPSLLDPDQDATYFGAFKVRDID

SEQ ID NO: 712 - DNA, 3240 bp, Homo sapien
  Unsure 2770: Unknown base
ctgggggtccgttccccaacttcctcggcgctccggactcccaagtctccgccggaccctcctttggatattcctcgtgtctccgattctgagagagggggaagacggtggggcctccccacctgccccgcagaagatgcagttctttggccgcctggtcaataccttcagtggcgtcaccaacttgttctctaacccattccgggtgaaggaggtggctgtggccgactacacctcgagtgaccgagttcgggaggaagggcagctgattctgttccagaacactcccaaccgcacctgggactgcgtcctggtcaaccccaggaactcacagagtggattccgactcttccagctggagttggaggctgacgccctagtgaatttccatcagtattcttcccagctgctacccttctatgagagctcccctcaggtcctgcacactgaggtcctgcagcacctgaccgacctcatccgtaaccaccccagctggtcagtggcccacctggctgtggagctagggatccgcgagtgcttccatcacagccgtatcatcagctgtgccaattgcgcggagaacgaggagggctgcacacccctgcacctggcctgccgcaagggtgatggggagatcctggtggagctggtgcagtactgccacactcagatggatgtcaccgactacaagggagagaccgtcttccattatgctgtccagggtgacaattctcaggtgctgcagctccttggaaggaacgcagtggctggcctgaaccaggtgaataaccaagggctgaccccgctgcacctggcctgccagctggggaagcaggagatggtccgcgtgctgctgctgtgcaatgctcggtgcaacatcatgggccccaacggctaccccatccactcggccatgaagttctctcagaaggggtgtgcggagatgatcatcagcatggacagcagccagatccacagcaaagacccccgttacggagccagccccctccactgggccaagaacgcagagatggcccgcatgctgctgaaacggggctgcaacgtgaacagcaccagctccgcggggaacacggccctgcacgtggcggtgatgcgcaaccgcttcgactgtgccatagtgctgctgacccacggggccaacgcggatgcccgcggagagcacggcaacaccccgctgcacctggccatgtcgaaagacaacgtggagatgatcaaggccctcatcgtgttcggagcagaagtggacaccccgaatgactttggggagactcctacattcctagcctccaaaatcggcagacttgtcaccaggaaggcgatcttgactctgctgagaaccgtgggggccgaatactgcttcccacccatccacggggtccccgcggagcagggctctgcagcgccacatcatcccttctccctggaaagagctcagcccccaccgatcagcctaaacaacctagaactacaggatctcatgcacatctcacgggcccggaagccagcgttcatcctgggctccatgagggacgagaagcggacccacgaccacctgctgtgcctggatggaggaggagtgaaaggcctcatcatcatccagctcctcatcgccatcgagaaggcctcgggtgtggccaccaaggacctgtttgactgggtggcgggcaccagcactggaggcatcctggccctggccattctgcacagtaagtccatggcctacatgcgcggcatgtactttcgcatgaaggatgaggtgttccggggctccaggccctacgagtcggggcccctggaggagttcctgaagcgggagtttggggagcacaccaagatgacggacgtcaggaaacccaaggtgatgctgacagggacactgtctgaccggcagccggctgaactccacctcttccggaactacgatgctccagaaactgtccgggagcctcgtttcaaccagaacgttaacctcaggcctccagctcagccctcagaccagctggtgtggcgggcggcccgaagcagcggggcagctcctacttacttccgacccaatgggcgcttcctggacggtgggctgctggccaacaaccccacgctggatgccatgaccgagatccatgagtacaatcaggacctgatccgcaagggtcaggccaacaaggtgaagaaactctccatcgttgtctccctggggacagggaggtccccacaagtgcctgtgacctgtgtggatgtcttccgtcccagcaacccctgggagctggccaagactgtttttggggccaaggaactgggcaagatggtggtggactgttgcacggatccagacgggcgggctgtggaccgggcacgggcctggtgcgagatggtcggcatccagtacttcagattgaacccccagctggggacggacatcatgctggatgaggtcagtgacacagtgctggtcaacgccctctgggagaccgaggtctacatctatgagcaccgcgaggagttccagaagctcatccacctgctgctctcaccctgagggtccccagcctctcaccggccccagctgacctcgtccattcagcccctgccaggccaagcccagccactgccctcccgggcagatctgggcccaggcacctctgagtccatagaccaggcctgggagaatgccaagctgcctgcccgaggctggtcctgaaggcctgtctcccactaacccccccttccatcactttctgtcatgccaggntgggaaagtctagagccccctttggcccctttccctgactgtcaaggacaactgactcccccatcagctcaaacattaagggtacccgggcacaaccgtacccgtgcccccagccccagcctaccctgagggcctgccgggctgcctttgccccagcccccagcaagggcattcccaggcttcctggtgggtgcagcccaatccctctgccctctgctccgttccctgggggctgggactaaagaaatgggtgtcccccaccccatcagctgggaaagcccaggccgcaggagtgggatgcccgttggactttgcccctcacactggcccagcccctcacactgccccaccccgagaaccctcagctctcaaaggtcactcctgggagtttcttcttcccaatggaagtggcttaagagccaaaactgaaataaatcatttggattcaagttcaaaaaaaaaaaaaaaaa

SEQ ID NO: 713 - protein, 806 aa, Homo sapien
MQFFGRLVNTFSGVTNLFSNPFRVKEVAVADYTSSDRVREEGQLILFQNTPNRTWDCVLVNPRNSQSGFRLFQLELEADALVNFHQYSSQLLPFYESSPQVLHTEVLQHLTDLIRNHPSWSVAHLAVELGIRECFHHSRIISCANCAENEEGCTPLHLACRKGDGEILVELVQYCHTQMDVTDYKGETVFHYAVQGDNSQVLQLLGRNAVAGLNQVNNQGLTPLHLACQLGKQEMVRVLLLCNARCNIMGPNGYPIHSAMKFSQKGCAEMIISMDSSQIHSKDPRYGASPLHWAKNAEMARMLLKRGCNVNSTSSAGNTALHVAVMRNRFDCAIVLLTHGANADARGEHGNTPLHLAMSKDNVEMIKALIVFGAEVDTPNDFGETPTFLASKIGRLVTRKAILTLLRTVGAEYCFPPIHGVPAEQGSAAPHHPFSLERAQPPPISLNNLELQDLMHISRARKPAFILGSMRDEKRTHDHLLCLDGGGVKGLIIIQLLIAIEKASGVATKDLFDWVAGTSTGGILALAILHSKSMAYMRGMYFRMKDEVFRGSRPYESGPLEEFLKREFGEHTKMTDVRKPKVMLTGTLSDRQPAELHLFRNYDAPETVREPRFNQNVNLRPPAQPSDQLVWRAARSSGAAPTYFRPNGRFLDGGLLANNPTLDAMTEIHEYNQDLIRKGQANKVKKLSIVVSLGTGRSPQVPVTCVDVFRPSNPWELAKTVFGAKELGKMVVDCCTDPDGRAVDRARAWCEMVGIQYFRLNPQLGTDIMLDEVSDTVLVNALWETEVYIYEHREEFQKLIHLLLSP

SEQ ID NO: 714 - DNA, 971 bp, Homo sapien
taaaactttaggaaattagtaccagacttttatattggtcaacagcaaaatgaacattactactcagcctccaacacatgcagtttgcctataccagggatcctgtcaaaatatacaccacttatagcttcttaagtgcagttatcatagagcacagtccctgacatcacacagctgcagagatgaataaacaaagaggaacctactcagaagtgagtctggcccaggacccaaagaggcagcaaaggaaacttaagggcaataaaatctccatttcaggaaccaaacaggaaatattccaagtagaattaaaccttcaaaatgcttcttcggatcatcaagggaatgacaagacatatcactgcaaaggtttactgccacctccagagaagctcactgctgaggtcctaggaatcatttgcattgtcctgatggccactgtgttaaaaacaatagttcttattccttgtattggagtactggagcagaacaatttttccctgaatagaagaatgcagaaagcacgtcattgtggccattgtcctgaggagtggattacatattccaacagttgttattacattggtaaggaaagaagaacttgggaagaaagagtttgctggcctgtgcttcgaagaactctgatctgctttctatagataatgaggaagaaatggtaagacgtaaatgtttcaacactttactaaaagcttatttctgtcaatatcatatttgtagaaatcatccatatgtttatacatatatttacttcatatatttttaagtctgtgtagtattcaactgacttcataatatttttatattcatatactgttaatgcacatttggttatttccagttttgcttttcatggaaacccatgcttctataaatgtttttatcacaaaataaatataaagaaaactaaaaaaaaaccaaaaaaaaaaaaaaaaaaggcggccgcgatatag

SEQ ID NO: 715 - protein, 158 aa, Homo sapien
MNKQRGTYSEVSLAQDPKRQQRKLKGNKISISGTKQEIFQVELNLQNASSDHQGNDKTYHCKGLLPPPEKLTAEVLGIICIVLMATVLKTIVLIPCIGVLEQNNFSLNRRMQKARHCGHCPEEWITYSNSCYYIGKERRTWEERVCWPVLRRTLICFL

SEQ ID NO: 716 - DNA, 2748 bp, Homo sapien
gaattcgatttttgagacttctccatcgggatcgcctggtgtcaccaagtgtccactggtactgaggtttgctgcctgccttcttgccatgtctaacgaagtagaaacaagtgcaaccaatggtcagcccgaccaacaggccgcaccaaaagcaccctcaaagaaggaaaaaaagaaaggccctgaaaagacagatgaatatctcttagcaaggttcaaaggcgatggtgtaaaatataaggccaagctgattggcattgatgatgtgccagatgcaagaggggataaaatgagccaagactctatgatgaaactaaagggaatggcggcagctggtcggtctcagggacaacacaaacaaaggatctgggtcaacatttccctttctgggataaaaataattgatgagaaaactggggtaatagagcatgaacatccagtaaataagatttctttcattgcccgtgatgtgacagacaaccgggcatttggttacgtgtgtggaggagaaggccagcatcagttttttgccataaaaaccgggcaacaggctgaaccattagttgttgatcttaaagacctttttcaagttatctataatgtaaagaaaaaggaagaagaaaagaaaaagatagaggaagccagcaaagcagttgagaatgggagtgaggccctaatgattctagatgaccaaactaacaaactgaaatcggaaagcaaagatatcctgttagtggatctaaactctgaaatcgacaccaatcagaattctttaagagaaaatccattcttaacaaacggcatcacctcctgttctcttcctcgaccaacgcctcaggcatccttcttgcctgaaaatgccttttctgccaatctcaacttctttcccacccctaatcctgatcctttccgtgacgatcctttcacacagccagaccaatcgacaccttcttcgtttgattctctcaaatctccagatcagaagaaagagaattcgagtagctcgtctactccgctgagtaatgggcccctgaatggtgatgttgactactttggtcagcaatttgaccagatctctaaccggactggcaaacaggaagctcaggcaggcccatggcccttttcaagttcgcaaacccagccagcagtgagaactcaaaatggggtatctgaaagagaacagaacggcttctctgtcaaatcctccccgaacccttttgtgggaagccctcccaaaggactgtccatacagaatggcgtaaagcaggacttggaaagctctgtccagtcctcaccacatgactccatagccattatcccacctccacaaagtaccaaaccaggaagaggcagaaggactgctaagtcttcagccaatgacttgcttgcatcagacatctttgctcctcccgtctcagaaccttcaggccaggcgtcacccacaggacaacctacagccctgcagcccaaccctctggatctcttcaaaacaagtgctcctgccccagtggggccccaggtgggtctaggtggtgtaactgtcacacttcctcaggcaggaccatggaacacagcatctttggtcttcaatcagtccccttcaatggctccgggagccatgatgggtggtcaaccttcaggttttagtcagcccgtcatttttggtacaagtccagctgtttcaggttggaaccagccttcaccctttgcagcctcaactccccctccagtgcctgttgtctggggcccttctgcatctgtggcacccaatgcttggtcaacaacaagccctttggggaatccttttcagagcaatatttttccagctcctgctgtgtccactcagcccccatccatgcactcctctctcctggtcactcctcctcagccacctcccagagctggccctcccaaggacatctccagtgatgccttcactgccttagacccacttggggataaagagatcaaggatgtgaaagaaatgtttaaggatttccaactgcggcagccacctgctgtgcccgcgcggaagggagagcagacttcttctgggactttgagtgcctttgccagttatttcaacagcaaggttggcattcctcaggagaatgcagaccatgatgactttgatgctaatcaactattgaacaagatcaatgaaccaccaaagccagctcccagacaagtttccctgccagttaccaaatctactgacaatgcatttgagaaccctttctttaaagattcttttggttcatcacaagcctctgtggcttcttctcaacctgtatcttctgagatgtatagggatccatttggaaatccttttgcctaaattctgaacttggtctgcagaccatccagaggaataaaaaggttggccttagtagtcaaaaacaaagctgatagccagacacgttctgatttctgcccttgttccagctttgacgtattatctgttgccttatttctcattgcctcttctacttgtaaaatgcttttcactttctgtctaggttaaagctaaactgaatctatggctttaaataaattaagatcctaaactctctagcttaagtgtaaatgaagtacagtagtttccctactgaaccctgcctcttgtgtccctggaaccttctagaacacctgccttctaccctctggttgggagatgcagccaccacatcccttcatatcatactgttttgaataaattttcaaatccttaaaaaaaaaaaaaaaaaa

SEQ ID NO: 717 - protein, 749 aa, Homo sapien [sequence omitted]

SEQ ID NO: 718 - DNA, 3147 bp, Homo sapien
gtcgcgccattttgccggggtttgaatgtgaggcggagcggcggcaggagcggatagtgccagctacggtccgcggctggggttccctcctccgtttctgtatccccacgagatcctatagcaatggaactcagcgatgcaaatctgcaaacactaacagaatatttaaagaaaacacttgatcctgatcctgccatccgacgtccagctgagaaatttcttgaatctgttgaaggaaatcagaattatccactgttgcttttgacattactggagaagtcccaggataatgttatcaaagtatgtgcttcagtaacattcaaaaactatattaaaaggaactggagaattgttgaagatgaaccaaacaaaatttgtgaagccgatcgagtggccattaaagccaacatagtgcacttgatgcttagcagcccagagcaaattcagaagcagttaagtgatgcaattagcattattggcagagaagattttccacagaaatggcctgacttgctgacagaaatggtgaatcgctttcagagtggagatttccatgttattaatggagtcctccgtacagcacattcattatttaaaagataccgtcatgaatttaagtcaaacgagttatggactgaaattaagcttgttctggatgcctttgctttgcctttgactaatctttttaaggccactattgaactctgcagtacccatgcaaatgatgcctctgccctgaggattctgttttcttccctgatcctgatctcaaaattgttctatagtttaaactttcaggatctccctgaattttgggaaggtaatatggaaacttggatgaataatttccatactctcttaacattggataataagcttttacaaactgatgatgaagaggaagccggcttattggagctcttaaaatcccagatttgtgataatgccgcactctatgcacaaaagtacgatgaagaattccagcgatacctgcctcgttttgttacagccatctggaatttactagttacaacgggtcaagaggttaaatatgatttgttggtaagtaatgcaattcaatttctggcttcagtttgtgagagacctcattataagaatctatttgaggaccagaacacgctgacaagtatctgtgaaaaggttattgtgcctaacatggaatttagagctgctgatgaagaagcatttgaagataattctgaggagtacataaggagagatttggaaggatctgatattgatactagacgcagggctgcttgtgatctggtacgaggattatgcaagttttttgagggacctgtgacaggaatcttctctggttatgttaattccatgctgcaggaatacgcaaaaaatccatctgtcaactggaaacacaaagatgcagccatctacctagtgacatctttggcatcaaaagcccaaacacagaagcatggaattacacaagcaaatgaacttgtaaacctaactgagttctttgtgaatcacatcctccctgatttaaaatcagctaatgtgaatgaatttcctgtccttaaagctgacggtatcaaatatattatgatttttagaaatcaagtgccaaaagaacatcttttagtctcgattcctctcttgattaatcatcttcaagctggaagtattgttgttcatacttacgcagctcatgctcttgaacggctctttactatgcgagggcctaacaatgccactctctttacagctgcagaaatcgcaccgtttgttgagattctgctaacaaaccttttcaaagctctcacacttcctggctcttcagaaaatgaatatattatgaaagctatcatgagaagtttttctctcctacaagaagccataatcccctacatccctactctcatcactcagcttacacagaagctattagctgttagtaagaacccaagcaaacctcactttaatcactacatgtttgaagcaatatgtttatccataagaataacttgcaaagctaaccctgctgctgttgtaaattttgaggaggctttgtttttggtgtttactgaaatcttacaaaatgatgtgcaagaatttattccatacgtctttcaagtgatgtctttgcttctggaaacacacaaaaatgacatcccgtcttcctatatggccttatttcctcatctccttcagccagtgctttgggaaagaacaggaaatattcctgctctagtgaggcttcttcaagcattcttagaacgcggttcaaacacaatagcaagtgctgcagctgacaaaattcctgggttactaggtgtctttcagaagctgattgcatccaaagcaaatgaccaccaaggtttttatcttctaaacagtataatagagcacatgcctcctgaatcagttgaccaatataggaaacaaatcttcattctgctattccagagacttcagaattccaaaacaaccaagtttatcaagagttttttagtctttattaatttgtattgcataaaatatggggcactagcactacaagaaatatttgatggtatacaaccaaaaatgtttggaatggttttggaaaaaattattattcctgaaattcagaaggtatctggaaatgtagagaaaaagatctgtgcggttggcataaccaacttactaacagaatgtcccccaatgatggacactgagtataccaaactgtggactccattattacagtctttgattggtctttttgagttacccgaagatgataccattcctgatgaggaacattttattgacatagaagatacaccaggatatcagactgccttctcacagttggcatttgctgggaaaaaagagcatgatcctgtaggtcaaatggtgaataaccccaaaattcacctggcacagtcacttcacatgttgtctaccgcctgtccaggaagggttccatcaatggtgagcaccagcctgaatgcagaagcgctccagtatctccaagggtaccttcaggcagccagtgtgacactgctttaaactgcatttttctaatgggctaaacccagatggtttcctaggaaatcacaggcttctgagcacagctgcattaaaacaaaggaagttttccttttgaacttgtcacga

SEQ ID NO: 719 - protein, 971 aa, Homo sapien
MELSDANLQTLTEYLKKTLDPDPAIRRPAEKFLESVEGNQNYPLLLLTLLEKSQDNVIKVCASVTFKNYIKRNWRIVEDEPNKICEADRVAIKANIVHLMLSSPEQIQKQLSDAISIIGREDFPQKWPDLLTEMVNRFQSGDFHVINGVLRTAHSLFKRYRHEFKSNELWTEIKLVLDAFALPLTNLFKATIELCSTHANDASALRILFSSLILISKLFYSLNFQDLPEFWEGNMETWMNNFHTLLTLDNKLLQTDDEEEAGLLELLKSQICDNAALYAQKYDEEFQRYLPRFVTAIWNLLVTTGQEVKYDLLVSNAIQFLASVCERPHYKNLFEDQNTLTSICEKVIVPNMEFRAADEEAFEDNSEEYIRRDLEGSDIDTRRRAACDLVRGLCKFFEGPVTGIFSGYVNSMLQEYAKNPSVNWKHKDAAIYLVTSLASKAQTQKHGITQANELVNLTEFFVNHILPDLKSANVNEFPVLKADGIKYIMIFRNQVPKEHLLVSIPLLINHLQAGSIVVHTYAAHALERLFTMRGPNNATLFTAAEIAPFVEILLTNLFKALTLPGSSENEYIMKAIMRSFSLLQEAIIPYIPTLITQLTQKLLAVSKNPSKPHFNHYMFEAICLSIRITCKANPAAVVNFEEALFLVFTEILQNDVQEFIPYVFQVMSLLLETHKNDIPSSYMALFPHLLQPVLWERTGNIPALVRLLQAFLERGSNTIASAAADKIPGLLGVFQKLIASKANDHQGFYLLNSIIEHMPPESVDQYRKQIFILLFQRLQNSKTTKFIKSFLVFINLYCIKYGALALQEIFDGIQPKMFGMVLEKIIIPEIQKVSGNVEKKICAVGITNLLTECPPMMDTEYTKLWTPLLQSLIGLFELPEDDTIPDEEHFIDIEDTPGYQTAFSQLAFAGKKEHDPVGQMVNNPKIHLAQSLHMLSTACPGRVPSMVSTSLNAEALQYLQGYLQAASVTLL

SEQ ID NO: 720 - DNA, 3773 bp, Homo sapien
ccgtcccggggcggacgggcgcgggcgggaggatggagctgaactccctgctgatcctgctggaggcggccgagtacctggagcgcagggatcgagaggccgagcacggctacgcctcggtgctgcccttcgacggcgacttcgccagggagaaaacaaaggcggccggcctggtgcgcaaggccccgaacaacaggtcttcacacaacgagctagaaaagcacagacgagccaaactcaggctgtaccttgagcagctcaagcaactggtgcccctgggccccgacagcacccgccacaccacgctgagcctcctgaagcgggccaaggtgcacatcaagaaactggaggagcaggaccgccgggcactgagcatcaaggagcagctgcagcaggagcatcgtttcctgaagcggcgcctggagcagctgtcggtgcagagcgtggagcgcgtgcgcacagatagcacgggctctgctgtctccacggacgactcagagcaagaagtggacatagagggcatggagtttggccctggtgagctggacagtgttggcagcagcagtgacgcggacgaccactacagcctgcagagtggcaccggcggcgacagtggcttcgggccccactgccggcggctgggccgccccgccctctcgtaggcccgtgccctctgctccttggcctgcctgcccgccagccacgcgtgtcagccctccagttctccttcagttgacgccagcctctccacaggcccactgctgtgccattctggaagctccagctgctgctgggctgcctggcactgcccgcttgccggtcagggcctgccgagctgcctgccccttccagctgggcagagtcccctgcaaggaggcagggcccagcttccacatccggagccctggtcagcatagccgcccacggtctgttctcagattcctaatcattccagaagtattaaacgtcattgctgcaaacctcggcaggtgccgtgtgaggggcttaatgaccaccacagggagctcagaccccaaccctggatcccaggagaaaggagtggaccgaggaaggaaggaaggcaaggctgtctgtccatccgtccgtctgtccacctacctgtcagtccacataggctcctggcgtggacaaggggtctgtgaagggcgggaactgggtgagcacctggggcaggtgggtggttaaggtccttcccacttcgcaggtgtcagaacctagggctgggctctcggggccaggcaggccagcccagcccacgccgagctgggcagcgtctgctctggtaggactgtcagacgcacacgcgcacgcacctagacacacccactcatgtacatgctcacacatgcagacacacctgggcgtcccgaggtcacatgttctggggatgatggccttcaggggtcatctggcaaacagcccctgggctgtgcctggatccccctctagctcctgctcacccacgcccacccagtagtcctgcctgtctgcacaggagaggggcttctcttcctggctggggctggggtgaactggaggctggttaagttgcagccgctgggtcctcgggggcttactcatctcccttttttaaacaaaaagcaaaaaagtaaaatgctgcactgcccagcagcccggttagggctcctggagccaccttaggaaagggcttctcatgagctctgctgcggcagcttcagctggcagagaggctttcccagaaaaaaaaaaaaaaccatttttaaaaagaagaaagcctaaagactctcggcctagggacgtccgtgtgtgccgcctctgtttcctgtaccagatttttgtattctattttcctagctgttgttgcgtccttgtttgctgaggggtgggagccacccagcgtctcagggacctgtccctccgtcacgtcgtcaaagtgtgccttgtgtcttgtgtcaggccttgcccttcccaccagcatgtccctcgtggctcagggtgccccaggcctgcccagctagtgctgtcctcccatctcctgtgggcagcccctcccggcagccagggcttcctggaggcgatgcagccaggcccctgtgggtggcacggaggggctgtgacctggtccccagtgttgccctccccagtggctggcaggggcctgcttgctcactagagagatggattctcacctgtcacctgactcgagccccctgcttcctggcctaggcgagggttccaggtttcagacactggcagccaatgaagactgtgctcgctgggtggtgcaggcctggcaccaggaggcttgcacccgcctttccttcctgacgtcctctgtccttggggctggcccatagcagtgcctgccgtgcctctggtacatctgtagccaattcccatatcatggggaaaattcgtgtctattttcagtcgtacgcatagacgccccaggatggggggcccactgtggcggaagggggtccctggaaacaactctggcacagaacctgccctgcaggctgtagggggcatggtgcctggagctgaggggcatccgaacgcgttgcgggtggttgtgaggaggcctgtctgcatctccttccggccccactggggtccaggggtgcccagaaaggagcttcccctgcctgcctgagtctgtccccccaggcttcatttcaaacaccgtggcacctccgagcaaggcgggccgtgtgtaaaagcttgcttccccagccagcactgcagggccctgaggtggtcgtgtccctgccctcaattcttgaagcaccagctccctgccccaccctccagtgcctgaggcagctaggggcttctgctctcatctctgaccagcagaatccacccggtgaccagtggtggcccctcagcccaccctcccggcagctcagcctgtggctcttgaggccgtggttcccacgtggactgggaggcagtctcagccacccggggtgctgttcagctgcccctccctgccatcagcaggtgggtgaggggttgcccactgggtgggggcccgtgctaggagtcaccacatgctccaacctcccactgctccctgtcaggggcccaggctgccatcactggaggctgcagggaccaagaggccatcaccgtgtctatagagagcagacagaagcagaacagagcccggggctcctgagcctctgcgtgtgccctcccagcccacaccagtgctctcggccactgagcacccagactcaggcttgggttccccagccttattggaaggcagctcccgcataccaggataacccccgcaaaccacatagcagacccccgccatcctcgcagagtgggagaggctgcagcaaggctttgcctctgcagaccccatcttagtggcacggtgcttgggcctgtgtccccgggtggtggaaccctgtaccggtctgtggccctagggtccctgctctgtctgccccggcccgtgctgtccgctgggtgaggcaggctcccccgtgccctgcctccctctgtcagggaacctgggaccccctccccactgcctgcacagaggaccctgaccctcggccagcagggtggccccaggtccatgttgggcactagggcaggttccgtgccagagtcgggggccacacgagggcctggtgccggtgaggggggcgtgcgctagagggggaaaggggcccccggccacctgtccaccgtgtgggccgtgctgtgtccttatgtcattgtaatataaatacagatttttatatctc

SEQ ID NO: 721 - protein, 209 aa, Homo sapien
MELNSLLILLEAAEYLERRDREAEHGYASVLPFDGDFAREKTKAAGLVRKAPNNRSSHNELEKHRRAKLRLYLEQLKQLVPLGPDSTRHTTLSLLKRAKVHIKKLEEQDRRALSIKEQLQQEHRFLKRRLEQLSVQSVERVRTDSTGSAVSTDDSEQEVDIEGMEFGPGELDSVGSSSDADDHYSLQSGTGGDSGFGPHCRRLGRPALS

SEQ ID NO: 722 - DNA, 1909 bp, Homo sapien
gaggtgtttcccttagctatggaaactctataagagagatccagcttgcctcctcttgagcagtcagcaacagggtcccgtccttgacacctcagcctctacaggactgagaagaagtaaaaccgtttgctggggctggcctgactcaccagctgccatgcagcagcccttcaattacccatatccccagatctactgggtggacagcagtgccagctctccctgggcccctccaggcacagttcttccctgtccaacctctgtgcccagaaggcctggtcaaaggaggccaccaccaccaccgccaccgccaccactaccacctccgccgccgccgccaccactgcctccactaccgctgccacccctgaagaagagagggaaccacagcacaggcctgtgtctccttgtgatgtttttcatggttctggttgccttggtaggattgggcctggggatgtttcagctcttccacctacagaaggagctggcagaactccgagagtctaccagccagatgcacacagcatcatctttggagaagcaaataggccaccccagtccaccccctgaaaaaaaggagctgaggaaagtggcccatttaacaggcaagtccaactcaaggtccatgcctctggaatgggaagacacctatggaattgtcctgctttctggagtgaagtataagaagggtggccttgtgatcaatgaaactgggctgtactttgtatattccaaagtatacttccggggtcaatcttgcaacaacctgcccctgagccacaaggtctacatgaggaactctaagtatccccaggatctggtgatgatggaggggaagatgatgagctactgcactactgggcagatgtgggcccgcagcagctacctgggggcagtgttcaatcttaccagtgctgatcatttatatgtcaacgtatctgagctctctctggtcaattttgaggaatctcagacgtttttcggcttatataagctctaagagaagcactttgggattctttccattatgattctttgttacaggcaccgagaatgttgtattcagtgagggtcttcttacatgcatttgaggtcaagtaagaagacatgaaccaagtggaccttgagaccacagggttcaaaatgtctgtagctcctcaactcacctaatgtttatgagccagacaaatggaggaatatgacggaagaacatagaactctgggctgccatgtgaagagggagaagcatgaaaaagcagctaccaggtgttctacactcatcttagtgcctgagagtatttaggcagattgaaaaggacaccttttaactcacctctcaaggtgggccttgctacctcaagggggactgtctttcagatacatggttgtgacctgaggatttaagggatggaaaaggaagactagaggcttgcataataagctaaagaggctgaaagaggccaatgccccactggcagcatcttcacttctaaatgcatatcctgagccatcggtgaaactaacagataagcaagagagatgttttggggactcatttcattcctaacacagcatgtgtatttccagtgcaattgtaggggtgtgtgtgtgtgtgtgtgtgtgtgtgtgtgtatgactaaagagagaatgtagatattgtgaagtacatattaggaaaatatgggttgcatttggtcaagattttgaatgcttcctgacaatcaactctaatagtgcttaaaaatcattgattgtcagctactaatgatgttttcctataatataataaatatttatgtagatgtgcatttttgtgaaatgaaaacatgtaataaaaagtatatgttaggatacaaaaaaaaaaaaaaaaaaaaaaaaaaaaaaaaaaaaaaaaaaaaaaaaaaaa

SEQ ID NO: 723 - protein, 281 aa, Homo sapien
MQQPFNYPYPQIYWVDSSASSPWAPPGTVLPCPTSVPRRPGQRRPPPPPPPPPLPPPPPPPPLPPLPLPPLKKRGNHSTGLCLLVMFFMVLVALVGLGLGMFQLFHLQKELAELRESTSQMHTASSLEKQIGHPSPPPEKKELRKVAHLTGKSNSRSMPLEWEDTYGIVLLSGVKYKKGGLVINETGLYFVYSKVYFRGQSCNNLPLSHKVYMRNSKYPQDLVMMEGKMMSYCTTGQMWARSSYLGAVFNLTSADHLYVNVSELSLVNFEESQTFFGLYKL

SEQ ID NO: 724 - DNA, 3045 bp, Homo sapien; identical to SEQ ID NO: 376

SEQ ID NO: 725 - protein, 265 aa, Homo sapien; identical to SEQ ID NO: 377

SEQ ID NO: 726 - DNA, 2427 bp, Homo sapien; identical to SEQ ID NO: 585

SEQ ID NO: 727 - protein, 719 aa, Homo sapien [sequence omitted]

SEQ ID NO: 728 - DNA, 1776 bp, Mus musculus
gcggagcgagaggctgagagagtcggagacactatccgcttccatccgtcgcgcagaccctgccggagccgctgccgctatggatgatcgagaggatctggtgtaccaggcgaagctggccgagcaggctgagcgatacgacgaaatggtggagtcaatgaagaaagtagcagggatggatgtggagctgacagttgaagaaagaaacctcctatctgttgcatataagaatgtgattggagctagaagagcctcctggagaataatcagcagcattgaacagaaagaagaaaacaagggaggagaagacaagctaaaaatgattcgggaatatcggcaaatggttgagactgagctaaagttaatctgttgtgacattctggatgtactggacaaacacctcattccagcagctaacactggcgagtccaaggttttctattataaaatgaaaggggactaccacaggtatctggcagaatttgccacaggaaacgacaggaaggaggctgcggagaacagcctagtggcttataaagctgctagtgatattgcaatgacagaacttccaccaacgcatcctattcgcttaggtcttgctctcaatttttccgtattctactacgaaattcttaattcccctgaccgtgcctgcaggttggcaaaagcagcttttgatgatgcaattgcagaactggatacgctgagtgaagaaagctataaggactctacacttatcatgcagttgttacgtgataatctgacactatggacttcagacatgcagggtgacggtgaagagcagaataaagaagcgctgcaggacgtggaagacgaaaatcagtgagacataagccaacaagagaaaccatctctgaccaccccctcctccccatcccaccctttggaaactccccattgtcactgagaaccaccaaatctgacttttacatttggtctcagaatttaggttcctgccctgttggttttttttttttttttttttaaacagttttcaaaagttcttaaaggcaagagtgaatttctgtggattttactggtcccagcttttaggttctttaagacactaacaggactacatagaggctttttcagcattactgtgtcgtctccgtgccagatgtggcaagatcaccattagcaaatggaaattacatttgaaagccattagacttataggtgatgcaagcatctaagagagaggttaatcacactatagaggcataagtggtatcagttttcatttttctaattgtttaaactgtgttttataccagtgtttgcaagtaattgggtgttagcttgagatggttaaaggtggtttggggagggacttcgttgtaatggttttgctgtaaaaaatgtttccaactccgctgaaatgttgctgaaaagcatggtgctggtaacagttcaacaatccgtggctgctcattcttgcctactttactctcccactgaagcaggttagcgttgaaggtggtatggaaaagcctgcatgcctgttcaattcttttgtttcttctccttccccctccccctacctccttcccctcactcctcccctccttcgctcgctcaacctcttttgttcagtatgtgtaacttgaagctaatttgtactactggatatctgactggagccacagatacagaatctgtattgttcttactgaaacacagcatggaattaacattaaacttaaataaaacaaacctaaattaaaaaaaaaaaaaaaaaaaaaaaaaaaaaaa

SEQ ID NO: 729 - protein, 255 aa, Mus musculus
MDDREDLVYQAKLAEQAERYDEMVESMKKVAGMDVELTVEERNLLSVAYKNVIGARRASWRIISSIEQKEENKGGEDKLKMIREYRQMVETELKLICCDILDVLDKHLIPAANTGESKVFYYKMKGDYHRYLAEFATGNDRKEAAENSLVAYKAASDIAMTELPPTHPIRLGLALNFSVFYYEILNSPDRACRLAKAAFDDAIAELDTLSEESYKDSTLIMQLLRDNLTLWTSDMQGDGEEQNKEALQDVEDENQ

SEQ ID NO: 730 - DNA, 2930 bp, Homo sapien
ggcacgaggggcggcggagccgactcgtcgcggccgaggcgcacgcggtccgcgccggcgtcagtctgggattggccggcccgcgacttcctccgccccctgccaatcgccggggacgacttccgtgggtttttccggctctcccgcgtcgctaaggagcgacgggctgtcggccagaccccgagttctcggtgcgctcagcggccgccgacgctaggaggccgcgctccgcccccgctaccatgaggccccggaaagccttcctgctcctgctgctcttggggctggtgcagctgctggccgtggcgggtgccgagggcccggacgaggattcttctaacagagaaaatgccattgaggatgaagaggaggaggaggaggaagatgatgatgaggaagaagacgacttggaagttaaggaagaaaatggagtcttggtcctaaatgatgcaaactttgataattttgtggctgacaaagacacagtgctgctggagttttatgctccatggtgtggacattgcaagcagtttgctccggaatatgaaaaaattgccaacatattaaaggataaagatcctcccattcctgttgccaagatcgatgcaacctcagcgtctgtgctggccagcaggtttgatgtgagtggctaccccaccatcaagatccttaagaaggggcaggctgtagactacgagggctccagaacccaggaagaaattgttgccaaggtcagagaagtctcccagcccgactggacgcctccaccagaagtcacgcttgtgttgaccaaagagaactttgatgaagttgtgaatgatgcagatatcattctggtggagttttatgccccatggtgtggacactgcaagaaacttgcccccgagtatgagaaggccgccaaggagctcagcaagcgttctcctccaattcccctggcaaaggtcgacgccaccgcagaaacagacctggccaagaggtttgatgtctctggctatcccaccctgaaaattttccgcaaaggaaggccttatgactacaacggcccacgagaaaaatatggaatcgttgattacatgatcgagcagtccgggcctccctccaaggagattctgaccctgaagcaggtccaggagttcctgaaggatggagacgatgtcatcatcatcggggtctttaagggggagagtgacccagcctaccagcaataccaggatgccgctaacaacctgagagaagattacaaatttcaccacactttcagcacagaaatagcaaagttcttgaaagtctcccaggggcagttggttgtaatgcagcctgagaaattccagtccaagtatgagccccggagccacatgatggacgtccagggctccacccaggactcggccatcaaggacttcgtgctgaagtacgccctgcccctggttggccaccgcaaggtgtcaaacgatgctaagcgctacaccaggcgccccctggtggtcgtctactacagtgtggacttcagctttgattacagagctgcaactcagttttggcggagcaaagtcctagaggtggccaaggacttccctgagtacacctttgccattgcggacgaagaggactatgctggggaggtgaaggacctggggctcagcgagagtggggaggatgtcaatgccgccatcctggacgagagtgggaagaagttcgccatggagccagaggagtttgactctgacaccctccgcgagtttgtcactgctttcaaaaaaggaaaactgaagccagtcatcaaatcccagccagtgcccaagaacaacaagggacccgtcaaggtcgtggtgggaaagacctttgactccattgtgatggaccccaagaaggacgtcctcatcgagttctacgcaccatggtgcgggcactgcaagcagctagagcccgtgtacaacagcctggccaagaagtacaagggccaaaagggcctggtcatcgccaagatggacgccactgccaacgacgtccccagcgaccgctataaggtggagggcttccccaccatctacttcgcccccagtggggacaaaaagaacccagttaaatttgagggtggagacagagatctggagcatttgagcaagtttatagaagaacatgccacaaaactgagcaggaccaaggaagagctttgaaggcctgaggtctgcggaaggtgggaggaggcagacaccctgcgtggcccatggtcggggcgtccacgccgaggccggcaacaaacgacagtatctcggattccttttttttttttttttaattttttatactttggtgtttcacttcatgctctgaatactgaataaccatgaatgactgaatagtttagtccagatttttacagaggatacatctatttttatcattatttggggtttgaaaaatttttttttacaccttctaatttctttatttctcaaagcagataattcttctgtgtgaaaatgttttctttttttaatttaaggtttaaaattcctttgccaaatcatgttgattttgctctttgctttttcgttgtctgagaaattgttggcgtagatttggcttctggtatgtgtttctgattgcttcctgttgagcacaaagtgagagctgccactgagcagccctgccaggggtgctgtttcaggctgggcatcgccaggcggcctccctgcaaaccaagggctgggggcaaaggggcatgatccagggtcccccagggtgggctcagctccagggagaggccacccacgtggcagccccacctcttgagagcccccagtgccggagcagaaaggaccctggacccagaggcagatactgcggggtggtagaaaaggtagagtaggctgtggcaatggaataaaacacgattaaaaacgttaaaaaaaaaaaaaaaaaaa

SEQ ID NO: 731 - protein, 645 aa, Homo sapien
MRPRKAFLLLLLLGLVQLLAVAGAEGPDEDSSNRENAIEDEEEEEEEDDDEEEDDLEVKEENGVLVLNDANFDNFVADKDTVLLEFYAPWCGHCKQFAPEYEKIANILKDKDPPIPVAKIDATSASVLASRFDVSGYPTIKILKKGQAVDYEGSRTQEEIVAKVREVSQPDWTPPPEVTLVLTKENFDEVVNDADIILVEFYAPWCGHCKKLAPEYEKAAKELSKRSPPIPLAKVDATAETDLAKRFDVSGYPTLKIFRKGRPYDYNGPREKYGIVDYMIEQSGPPSKEILTLKQVQEFLKDGDDVIIIGVFKGESDPAYQQYQDAANNLREDYKFHHTFSTEIAKFLKVSQGQLVVMQPEKFQSKYEPRSHMMDVQGSTQDSAIKDFVLKYALPLVGHRKVSNDAKRYTRRPLVVVYYSVDFSFDYRAATQFWRSKVLEVAKDFPEYTFAIADEEDYAGEVKDLGLSESGEDVNAAILDESGKKFAMEPEEFDSDTLREFVTAFKKGKLKPVIKSQPVPKNNKGPVKVVVGKTFDSIVMDPKKDVLIEFYAPWCGHCKQLEPVYNSLAKKYKGQKGLVIAKMDATANDVPSDRYKVEGFPTIYFAPSGDKKNPVKFEGGDRDLEHLSKFIEEHATKLSRTKEEL

SEQ ID NO: 732 - DNA, 1677 bp, Homo sapien
aggttctcttacatcgaccgcctaagagtcgcgctgtaagaagcaacaacctctcctcttcgtctccgccatcagctcggcagtcgcgaagcagcaaccatgcgtgagtgcatctccatccacgttggccaggctggtgtccagattggcaatgcctgctgggagctctactgcctggaacacggcatccagcccgatggccagatgccaagtgacaagaccattgggggaggagatgattccttcaacaccttcttcagtgagacgggggctggcaagcatgtgccccgggcagtgtttgtagacttggaacccacagtcattgatgaagttcgcactggcacctaccgccagctcttccaccctgagcaacttatcacaggcaaagaagatgctgccaataactatgcccgagggcactacaccattggcaaggagatcattgacctcgtgttggaccgaattcgcaagctggccgaccagtgcacgggtctccagggcttcttggttttccacagctttggtgggggaactggttctgggttcacctcgctgctcatggaacgtctctcagttgattatggcaagaagtccaagctggagttctctatttacccggcgccccaggtttccacagctgtagttgagccctacaactccatcctcaccacccacaccaccctggagcactctgattgtgccttcatggtagacaatgaggccatctatgacatctgtcgtagaaacctcgatattgagcgtccaacctatactaacctgaataggttaataggtcaaattgtgtcctccatcactgcttccctgagatttgatggagccctgaatgttgacctgacagaattccagaccaacctggtgccctatccccgcatccacttccctctggccacatatgcccctgtcatctctgctgagaaagcctaccatgaacagctttctgtagcagagatcaccaatgcttgctttgagccagccaaccagatggtgaaatgtgaccctcgccatggtaaatacatggcttgctgcctgttgtaccgtggtgacgtggttcccaaagatgtcaatgctgccattgccaccatcaagaccaagcgtaccatccagtttgtggattggtgccccactggcttcaaggttggcatcaactaccagcctcccactgtggtgcctggtggagacctggccaaggtacagagagctgtgtgcatgctgagcaacaccacagccattgctgaggcctgggctcgcctggaccacaagtttgacctgatgtatgccaaacgtgcctttgttcactggtacgttggggaggggatggaggaaggtgagttttcagaggcccgtgaggacatggctgcccttgagaaggattatgaggaggttggtgtggattctgttgaaggagagggtgaggaagaaggagaggaatactaaagttaaaacgtcacaaaggtgctgcttttacagggaagcttattctgttttaaacattgaaaagttgtggtctgatcagttaatttgtatgtagcagtgtatgctctcatatacaattactgacctatgctctaaaacatgaatgctttgttacagacccaagctgtccatttctgtgatgggttttgaataaagtattccctgtcttaaaaaaaaaaaaaa

SEQ ID NO: 733 - protein, 451 aa, Homo sapien
MRECISIHVGQAGVQIGNACWELYCLEHGIQPDGQMPSDKTIGGGDDSFNTFFSETGAGKHVPRAVFVDLEPTVIDEVRTGTYRQLFHPEQLITGKEDAANNYARGHYTIGKEIIDLVLDRIRKLADQCTGLQGFLVFHSFGGGTGSGFTSLLMERLSVDYGKKSKLEFSIYPAPQVSTAVVEPYNSILTTHTTLEHSDCAFMVDNEAIYDICRRNLDIERPTYTNLNRLIGQIVSSITASLRFDGALNVDLTEFQTNLVPYPRIHFPLATYAPVISAEKAYHEQLSVAEITNACFEPANQMVKCDPRHGKYMACCLLYRGDVVPKDVNAAIATIKTKRTIQFVDWCPTGFKVGINYQPPTVVPGGDLAKVQRAVCMLSNTTAIAEAWARLDHKFDLMYAKRAFVHWYVGEGMEEGEFSEAREDMAALEKDYEEVGVDSVEGEGEEEGEEY

SEQ ID NO: 734 - DNA, 1677 bp, Homo sapien; identical to SEQ ID NO: 732

SEQ ID NO: 735 - protein, 451 aa, Homo sapien; identical to SEQ ID NO: 733

SEQ ID NO: 736 - DNA, 1909 bp, Homo sapien; identical to SEQ ID NO: 722

SEQ ID NO: 737 - protein, 281 aa, Homo sapien; identical to SEQ ID NO: 723

SEQ ID NO: 738 - DNA, 1897 bp, Homo sapien
gtagatagtcagatgtcttttgaaaatgtgttttcggtgtggaatattaacccaatctttgataactcttccagaaccttcggctcgcgtgcttctgagctgctgtggatggcctcggctctctggactgtccttccgagtaggatgtcactgagatccctcaaatggagcctcctgctgctgtcactcctgagtttctttgtgatgtggtacctcagccttccccactacaatgtgatagaacgcgtgaactggatgtacttctatgagtatgagccgatttacagacaagactttcacttcacacttcgagagcattcaaactgctctcatcaaaatccatttctggtcattctggtgacctcccacccttcagatgtgaaagccaggcaggccattagagttacttggggtgaaaaaaagtcttggtggggatatgaggttcttacatttttcttattaggccaagaggctgaaaaggaagacaaaatgttggcattgtccttagaggatgaacaccttctttatggtgacataatccgacaagattttttagacacatataataacctgaccttgaaaaccattatggcattcaggtgggtaactgagttttgccccaatgccaagtacgtaatgaagacagacactgatgttttcatcaatactggcaatttagtgaagtatcttttaaacctaaaccactcagagaagtttttcacaggttatcctctaattgataattattcctatagaggattttaccaaaaaacccatatttcttaccaggagtatcctttcaaggtgttccctccatactgcagtgggttgggttatataatgtccagagatttggtgccaaggatctatgaaatgatgggtcacgtaaaacccatcaagtttgaagatgtttatgtcgggatctgtttgaatttattaaaagtgaacattcatattccagaagacacaaatcttttctttctatatagaatccatttggatgtctgtcaactgagacgtgtgattgcagcccatggcttttcttccaaggagatcatcactttttggcaggtcatgctaaggaacaccacatgccattattaacttcacattctacaaaaagcctagaaggacaggatactttgtggaaagtgttaaataaagtaggtactgtggaaaattcatggggaggtcagtgtgctggcttacactgaactgaaactcatgaaaaacccagactggagactggagggttacacttgtgatttattagtcaggcccttcaaagatgatatgtggaggaattaaatataaaggaattggaggtttttgctaaagaaattaataggaccaaacaatttggacatgtcattctgtagactagaatttcttaaaagggtgttactgaattataagctcactaggctgtaaaaacaaaacaatgtagagttttatttattgaacaatgtagtcacttgaaggttttgtgtatatcttatgtggattaccaatttaaaaatatatgtagttctgtgtcaaaaaacttcttcactgaagttatactgaacaaaattttacctgtttttggtcatttataaagtacttcaagatgttgcagtatttcacagttattattatttaaaattacttcaactttgtgtttttaaatgttttgacgatttcaatacaagataaaaaggatagtgaatcattctttacatgcaaacattttccagttacttaactgatcagtttattattgatacatcactccattaatgtaaagtcataggtcattattgcacatcagtaatctcttggactttgttaaatattttactgtggtaatatagagaagaattaaagcaaaaaaaaaaaaaaaaaaaaaaaaaaaaaa

SEQ ID NO: 739 - protein, 331 aa, Homo sapien
MASALWTVLPSRMSLRSLKWSLLLLSLLSFFVMWYLSLPHYNVIERVNWMYFYEYEPIYRQDFHFTLREHSNCSHQNPFLVILVTSHPSDVKARQAIRVTWGEKKSWWGYEVLTFFLLGQEAEKEDKMLALSLEDEHLLYGDIIRQDFLDTYNNLTLKTIMAFRWVTEFCPNAKYVMKTDTDVFINTGNLVKYLLNLNHSEKFFTGYPLIDNYSYRGFYQKTHISYQEYPFKVFPPYCSGLGYIMSRDLVPRIYEMMGHVKPIKFEDVYVGICLNLLKVNIHIPEDTNLFFLYRIHLDVCQLRRVIAAHGFSSKEIITFWQVMLRNTTCHY

SEQ ID NO: 740 - DNA, 4264 bp, Homo sapien
atttcccgccagcaggagccgcgcggtagatgcggtgcttttaggagctccgtccgacagaacggttgggccttgccggctgtcggtatgtcgcgacagagcaccctgtacagcttcttccccaagtctccggcgctgagtgatgccaacaaggcctcggccagggcctcacgcgaaggcggccgtgccgccgctgcccccggggcctctccttccccaggcggggatgcggcctggagcgaggctgggcctgggcccaggcccttggcgcgatccgcgtcaccgcccaaggcgaagaacctcaacggagggctgcggagatcggtagcgcctgctgcccccaccagttgtgacttctcaccaggagatttggtttgggccaagatggagggttacccctggtggccttgtctggtttacaaccacccctttgatggaacattcatccgcgagaaagggaaatcagtccgtgttcatgtacagttttttgatgacagcccaacaaggggctgggttagcaaaaggcttttaaagccatatacaggttcaaaatcaaaggaagcccagaagggaggtcatttttacagtgcaaagcctgaaatactgagagcaatgcaacgtgcagatgaagccttaaataaagacaagattaagaggcttgaattggcagtttgtgatgagccctcagagccagaagaggaagaagagatggaggtaggcacaacttacgtaacagataagagtgaagaagataatgaaattgagagtgaagaggaagtacagcctaagacacaaggatctaggcgaagtagccgccaaataaaaaaacgaagggtcatatcagattctgagagtgacattggtggctctgatgtggaatttaagccagacactaaggaggaaggaagcagtgatgaaataagcagtggagtgggggatagtgagagtgaaggcctgaacagccctgtcaaagttgctcgaaagcggaagagaatggtgactggaaatggctctcttaaaaggaaaagctctaggaaggaaacgccctcagccaccaaacaagcaactagcatttcatcagaaaccaagaatactttgagagctttctctgcccctcaaaattctgaatcccaagcccacgttagtggaggtggtgatgacagtagtcgccctactgtttggtatcatgaaactttagaatggcttaaggaggaaaagagaagagatgagcacaggaggaggcctgatcaccccgattttgatgcatctacactctatgtgcctgaggatttcctcaattcttgtactcctgggatgaggaagtggtggcagattaagtctcagaactttgatcttgtcatctgttacaaggtggggaaattttatgagctgtaccacatggatgctcttattggagtcagtgaactggggctggtattcatgaaaggcaactgggcccattctggctttcctgaaattgcatttggccgttattcagattccctggtgcagaagggctataaagtagcacgagtggaacagactgagactccagaaatgatggaggcacgatgtagaaagatggcacatatatccaagtatgatagagtggtgaggagggagatctgtaggatcattaccaagggtacacagacttacagtgtgctggaaggtgatccctctgagaactacagtaagtatcttcttagcctcaaagaaaaagaggaagattcttctggccatactcgtgcatatggtgtgtgctttgttgatacttcactgggaaagtttttcataggtcagttttcagatgatcgccattgttcgagatttaggactctagtggcacactatcccccagtacaagttttatttgaaaaaggaaatctctcaaaggaaactaaaacaattctaaagagttcattgtcctgttctcttcaggaaggtctgatacccggctcccagttttgggatgcatccaaaactttgagaactctccttgaggaagaatattttagggaaaagctaagtgatggcattggggtgatgttaccccaggtgcttaaaggtatgacttcagagtctgattccattgggttgacaccaggagagaaaagtgaattggccctctctgctctaggtggttgtgtcttctacctcaaaaaatgccttattgatcaggagcttttatcaatggctaattttgaagaatatattcccttggattctgacacagtcagcactacaagatctggtgctatcttcaccaaagcctatcaacgaatggtgctagatgcagtgacattaaacaacttggagatttttctgaatggaacaaatggttctactgaaggaaccctactagagagggttgatacttgccatactccttttggtaagcggctcctaaagcaatggctttgtgccccactctgtaaccattatgctattaatgatcgtctagatgccatagaagacctcatggttgtgcctgacaaaatctccgaagttgtagagcttctaaagaagcttccagatcttgagaggctactcagtaaaattcataatgttgggtctcccctgaagagtcagaaccacccagacagcagggctataatgtatgaagaaactacatacagcaagaagaagattattgattttctttctgctctggaaggattcaaagtaatgtgtaaaattatagggatcatggaagaagttgctgatggttttaagtctaaaatccttaagcaggtcatctctctgcagacaaaaaatcctgaaggtcgttttcctgatttgactgtagaattgaaccgatgggatacagcctttgaccatgaaaaggctcgaaagactggacttattactcccaaagcaggctttgactctgattatgaccaagctcttgctgacataagagaaaatgaacagagcctcctggaatacctagagaaacagcgcaacagaattggctgtaggaccatagtctattgggggattggtaggaaccgttaccagctggaaattcctgagaatttcaccactcgcaatttgccagaagaatacgagttgaaatctaccaagaagggctgtaaacgatactggaccaaaactattgaaaagaagttggctaatctcataaatgctgaagaacggagggatgtatcattgaaggactgcatgcggcgactgttctataactttgataaaaattacaaggactggcagtctgctgtagagtgtatcgcagtgttggatgttttactgtgcctggctaactatagtcgagggggtgatggtcctatgtgtcgcccagtaattctgttgccggaagataccccccccttcttagagcttaaaggatcacgccatccttgcattacgaagactttttttggagatgattttattcctaatgacattctaataggctgtgaggaagaggagcaggaaaatggcaaagcctattgtgtgcttgttactggaccaaatatggggggcaagtctacgcttatgagacaggctggcttattagctgtaatggcccagatgggttgttacgtccctgctgaagtgtgcaggctcacaccaattgatagagtgtttactagacttggtgcctcagacagaataatgtcaggtgaaagtacattttttgttgaattaagtgaaactgccagcatactcatgcatgcaacagcacattctctggtgcttgtggatgaattaggaagaggtactgcaacatttgatgggacggcaatagcaaatgcagttgttaaagaacttgctgagactataaaatgtcgtacattattttcaactcactaccattcattagtagaagattattctcaaaatgttgctgtgcgcctaggacatatggcatgcatggtagaaaatgaatgtgaagaccccagccaggagactattacgttcctctataaattcattaagggagcttgtcctaaaagctatggctttaatgcagcaaggcttgctaatctcccagaggaagttattcaaaagggacatagaaaagcaagagaatttgagaagatgaatcagtcactacgattatttcgggaagtttgcctggctagtgaaaggtcaactgtagatgctgaagctgtccataaattgctgactttgattaaggaattatagactgactacattggaagctttgagttgacttctgaccaaaggtggtaaattcagacaacattatgatctaataaactttattttttaaaaatga

SEQ ID NO: 741 - protein, 1360 aa, Homo sapien
MSRQSTLYSFFPKSPALSDANKASARASREGGRAAAAPGASPSPGGDAAWSEAGPGPRPLARSASPPKAKNLNGGLRRSVAPAAPTSCDFSPGDLVWAKMEGYPWWPCLVYNHPFDGTFIREKGKSVRVHVQFFDDSPTRGWVSKRLLKPYTGSKSKEAQKGGHFYSAKPEILRAMQRADEALNKDKIKRLELAVCDEPSEPEEEEEMEVGTTYVTDKSEEDNEIESEEEVQPKTQGSRRSSRQIKKRRVISDSESDIGGSDVEFKPDTKEEGSSDEISSGVGDSESEGLNSPVKVARKRKRMVTGNGSLKRKSSRKETPSATKQATSISSETKNTLRAFSAPQNSESQAHVSGGGDDSSRPTVWYHETLEWLKEEKRRDEHRRRPDHPDFDASTLYVPEDFLNSCTPGMRKWWQIKSQNFDLVICYKVGKFYELYHMDALIGVSELGLVFMKGNWAHSGFPEIAFGRYSDSLVQKGYKVARVEQTETPEMMEARCRKMAHISKYDRVVRREICRIITKGTQTYSVLEGDPSENYSKYLLSLKEKEEDSSGHTRAYGVCFVDTSLGKFFIGQFSDDRHCSRFRTLVAHYPPVQVLFEKGNLSKETKTILKSSLSCSLQEGLIPGSQFWDASKTLRTLLEEEYFREKLSDGIGVMLPQVLKGMTSESDSIGLTPGEKSELALSALGGCVFYLKKCLIDQELLSMANFEEYIPLDSDTVSTTRSGAIFTKAYQRMVLDAVTLNNLEIFLNGTNGSTEGTLLERVDTCHTPFGKRLLKQWLCAPLCNHYAINDRLDAIEDLMVVPDKISEVVELLKKLPDLERLLSKIHNVGSPLKSQNHPDSRAIMYEETTYSKKKIIDFLSALEGFKVMCKIIGIMEEVADGFKSKILKQVISLQTKNPEGRFPDLTVELNRWDTAFDHEKARKTGLITPKAGFDSDYDQALADIRENEQSLLEYLEKQRNRIGCRTIVYWGIGRNRYQLEIPENFTTRNLPEEYELKSTKKGCKRYWTKTIEKKLANLINAEERRDVSLKDCMRRLFYNFDKNYKDWQSAVECIAVLDVLLCLANYSRGGDGPMCRPVILLPEDTPPFLELKGSRHPCITKTFFGDDFIPNDILIGCEEEEQENGKAYCVLVTGPNMGGKSTLMRQAGLLAVMAQMGCYVPAEVCRLTPIDRVFTRLGASDRIMSGESTFFVELSETASILMHATAHSLVLVDELGRGTATFDGTAIANAVVKELAETIKCRTLFSTHYHSLVEDYSQNVAVRLGHMACMVENECEDPSQETITFLYKFIKGACPKSYGFNAARLANLPEEVIQKGHRKAREFEKMNQSLRLFREVCLASERSTVDAEAVHKLLTLIKEL

SEQ ID NO: 742 - DNA, 2924 bp, Homo sapien
gacgccgacgatgaagacaccgtggaaggttcttctgggactgctgggtgctgctgcgcttgtcaccatcatcaccgtgcccgtggttctgctgaacaaaggcacagatgatgctacagctgacagtcgcaaaacttacactctaactgattacttaaaaaatacttatagactgaagttatactccttaagatggatttcagatcatgaatatctctacaaacaagaaaataatatcttggtattcaatgctgaatatggaaacagctcagttttcttggagaacagtacatttgatgagtttggacattctatcaatgattattcaatatctcctgatgggcagtttattctcttagaatacaactacgtgaagcaatggaggcattcctacacagcttcatatgacatttatgatttaaataaaaggcagctgattacagaagagaggattccaaacaacacacagtgggtcacatggtcaccagtgggtcataaattggcatatgtttggaacaatgacatttatgttaaaattgaaccaaatttaccaagttacagaatcacatggacggggaaagaagatataatatataatggaataactgactgggtttatgaagaggaagtcttcagtgcctactctgctctgtggtggtctccaaacggcacttttttagcatatgcccaatttaacgacacagaagtcccacttattgaatactccttctactctgatgagtcactgcagtacccaaagactgtacgggttccatatccaaaggcaggagctgtgaatccaactgtaaagttctttgttgtaaatacagactctctcagctcagtcaccaatgcaacttccatacaaatcactgctcctgcttctatgttgataggggatcactacttgtgtgatgtgacatgggcaacacaagaaagaatttctttgcagtggctcaggaggattcagaactattcggtcatggatatttgtgactatgatgaatccagtggaagatggaactgcttagtggcacggcaacacattgaaatgagtactactggctgggttggaagatttaggccttcagaacctcattttacccttgatggtaatagcttctacaagatcatcagcaatgaagaaggttacagacacatttgctatttccaaatagataaaaaagactgcacatttattacaaaaggcacctgggaagtcatcgggatagaagctctaaccagtgattatctatactacattagtaatgaatataaaggaatgccaggaggaaggaatctttataaaatccaacttagtgactatacaaaagtgacatgcctcagttgtgagctgaatccggaaaggtgtcagtactattctgtgtcattcagtaaagaggcgaagtattatcagctgagatgttccggtcctggtctgcccctctatactctacacagcagcgtgaatgataaagggctgagagtcctggaagacaattcagctttggataaaatgctgcagaatgtccagatgccctccaaaaaactggacttcattattttgaatgaaacaaaattttggtatcagatgatcttgcctcctcattttgataaatccaagaaatatcctctactattagatgtgtatgcaggcccatgtagtcaaaaagcagacactgtcttcagactgaactgggccacttaccttgcaagcacagaaaacattatagtagctagctttgatggcagaggaagtggttaccaaggagataagatcatgcatgcaatcaacagaagactgggaacatttgaagttgaagatcaaattgaagcagccagacaattttcaaaaatgggatttgtggacaacaaacgaattgcaatttggggctggtcatatggagggtacgtaacctcaatggtcctgggatcaggaagtggcgtgttcaagtgtggaatagccgtggcgcctgtatcccggtgggagtactatgactcagtgtacacagaacgttacatgggtctcccaactccagaagacaaccttgaccattacagaaattcaacagtcatgagcagagctgaaaattttaaacaagttgagtacctccttattcatggaacagcagatgataacgttcactttcagcagtcagctcagatctccaaagccctggtcgatgttggagtggatttccaggcaatgtggtatactgatgaagaccatggaatagctagcagcacagcacaccaacatatatatacccacatgagccacttcataaaacaatgtttctctttaccttagcacctcaaaataccatgccatttaaagcttattaaaactcatttttgttttcattatctcaaaactgcactgtcaagatgatgatgatctttaaaatacacactcaaatcaagaaacttaaggttacctttgttcccaaatttcatacctatcatcttaagtagggacttctgtcttcacaacagattattaccttacagaagtttgaattatccggtcgggttttattgtttaaaatcatttctgcatcagctgctgaaacaacaaataggaattgtttttatggaggctttgcatagattccctgagcaggattttaatctttttctaactggactggttcaaatgttgttctcttctttaaagggatggcaagatgtgggcagtgatgtcactagggcagggacaggataagagggattagggagagaagatagcagggcatggctgggaacccaagtccaagcataccaacacgaccaggctactgtcagctcccctcggagaaaactgtgcagtctgcgtgtgaacagctcttctcctttagagcacaatggatctcgagggatcttccatacctaccagttctgcgcctcgaggccgcgactctaga

SEQ ID NO: 743 - protein, 766 aa, Homo sapien; identical to SEQ ID NO: 335

SEQ ID NO: 744 - DNA, 2044 bp, Homo sapien; identical to SEQ ID NO: 253

SEQ ID NO: 745 - protein, 344 aa, Homo sapien; identical to SEQ ID NO: 254

SEQ ID NO: 746 - DNA, 573 bp, Homo sapien
atggcctggatgctgttgctcatcttgatcatggtccatccaggatcctgtgctctctgggtgtcccagccccctgagattcgtaccctggaaggatcctctgccttcctgccctgctccttcaatgccagccaagggagactggccattggctccgtcacgtggttccgagatgaggtggttccagggaaggaggtgaggaatggaaccccagagttcaggggccgcctggccccacttgcttcttcccgtttcctccatgaccaccaggctgagctgcacatccgggacgtgcgaggccatgacgccagcatctacgtgtgcagagtggaggtgctgggccttggtgtcgggacagggaatgggactcggctggtggtggagaaagaacatcctcagctaggggctggtacagtcctcctccttcgggctggattctatgctgtcagctttctctctgtggccgtgggcagcaccgtctattaccagggcaaatgccactgtcacatgggaacacactgccactcctcagatgggccccgaggrgtgattccagagcccagatgtccctag

SEQ ID NO: 747 - protein, 190 aa, Homo sapien
MAWMLLLILIMVHPGSCALWVSQPPEIRTLEGSSAFLPCSFNASQGRLAIGSVTWFRDEVVPGKEVRNGTPEFRGRLAPLASSRFLHDHQAELHIRDVRGHDASIYVCRVEVLGLGVGTGNGTRLVVEKEHPQLGAGTVLLLRAGFYAVSFLSVAVGSTVYYQGKCHCHMGTHCHSSDGPRGVIPEPRCP

SEQ ID NO: 748 - DNA, 3300 bp, Homo sapien
ggggagaatctggtggatgctggaccttgctgctgctgctactgctgtttccaggggctgcagagcatggactgttaaatcttgcacttcttctgagtgagctgaattcttgccgccaggatggggaaacagaacagcaagctgcgcccggaggtcatgcaggacttgctggaaagcacagactttacagagcatgagatccaggaatggtataaaggcttcttgagagactgccccagtggacatttgtcaatggaagagtttaagaaaatatatgggaactttttcccttatggggatgcttccaaatttgcagagcatgtcttccgcaccttcgatgcaaatggagatgggacaatagactttagagaattcatcatcgccttgagtgtaacttcgagggggaagctggagcagaagctgaaatgggccttcagcatgtacgacctggacggaaatggctatatcagcaaggcagagatgctagtgatcgtgcaggcaatctataagatggtttcctctgtaatgaaaatgcctgaagatgagtcaaccccagagaaaagaacagaaaagatcttccgccagatggacaccaatagagacggaaaactctccctggaagagttcatccgaggagccaaaagcgacccgtccattgtgcgcctcctgcagtgcgacccgagcagtgccggccagttctgagccctgcgcccaccaatcgaattgtagagctgcttgtgttcccttttgattcttctttttaacaatttttttttttttttgccaaacaatatcaatggtgatgccgtcccctgtgcggtctgatgcgccttcctccgtgacgccttcagcctcttttgtcgtggatgcttcgtgggaatgcccagagccccagtgtgcttgtggagagcatggacagacttcgtggtgttcattgtttgatgatttttaatcgttactattatttctttttattctaatgtctctgttctaaaacgtaagactcgggggttggggcaaaagaagggaaacccatccagtcctgtgattctattgcaagcttcaaggggcttttgtttgaaagacaaaactccccacctgggtctgttgtcacacgtgccgtaggggtgatggatggcaccggatgctggattccccaagaacaagttaccctctggggtgaggctattccagcgagctgggacatttccccatgggggcccactcccctctcttccccagcaggctgtagtttctaagctgtgaacatttcaagataaattaacagaggagaggaaaaagatggctcagctattttttcacaggtttacactagttgagctaatatgcgtgtctttggaaattaaacacaaatggtaacatattccaaaaccagacccatcttgttgcctattgtgataaaataaaaagacggctgtatataacatattgggtaatgcagaccaaattaagtgttttgccttgtttaaatgaaatgcatgtttagtgagcactaatacaatcttattccagaagactgtttttagtagcttattgtgaagtaagacaactataatgaatgtctgtcttgtttggaagtcatatctgtctttgcacaaatgtaccaatcgacaagtatattttatatattccataaaaatacaaagtaaccctgactagggcccaactttaattttgaatgcatttccagagtggccatgcctagagggcagatgcagagcaggtggtagtgggacaggacaattggagcacaggaatgttaacatgtatgacaggggaccagtagggtggtttccctctcaggcccagcagcccattgacagcattagactggcggcatggtgcttttctgagcagatcaatactctgcagactcgaaaaaacatcacatacattcttggaacttcccagtggtttaatctatgtgcatggttagggagccaggcctggaatattcagtttccctgcccctgttaaagaatcagaggttgggcagtcatcaaattcatcataaagacatgggcaagtgtgtctgtggtttccaaggcccccctatggagaatccaaaagtattttccattgccgtgctctttgaatgcagacttctatttccagaagtgacagcacaagtctgagttgctgtttggtctggtgacctcagacacactaatttgaattgaaagctaagagtaaaaatttgctggttacaggcgagtcatactcttgcaagtagttagcaaagggaggcccaaattctcaaggttgttgatggggaacttgccactaagagaaggcagagaggtccctagtgggtatatttgctgccaagccacttgccaaagaagaggaaccacagaaagagagacatcatgaccaggagaaaaatgtgactagacatgctaacctccaggtttttatatatgacttgagtctgctgtaattggcagcagaaatccaaatttgtatggtagaccaaaaagaaccaaatccatagggtgaaattttgagacctagactctgtaaaaataatcctagtcttcctccaggggtcagttcctcacagtggttctgtaccaaaacttgccaaattcctccatggccaagtgttaaaatctgtgtttggaaaatagcgaattaacctaagacacagaaggcagactgggtgaggagacctagcatgccctattggcagtgctcaggagctgcatcccacttttccctgctctgaatcgaagtcctagttccttcctttgattctcctttggtaggtggaatcagttaatgttttgagaaacctgcctgggctctgcccttagtcatgacatctcgctgagccagacccactctgttccttggaacctagagctggagtgaggagtagaggtctccggctattccagaaagaaaagtgagccacatgcaggctgatgaatgccgacacttccagaatgtatagaaatagtccctgtcctggcctgccactgaccctgtctgtattttctcggaggttgtttttctccttctccttcccaggaaggtctttgtatgtcgaatccagtgcactcaagtttggccaagggactccacagcacccagaggactgcatgcctcaaggtttatgtcactcctctgctgggctgttcattgtcattgctgtgttcagggacctttggaaataaaacctgttctgtcccaaataaaaccagcctgtgatgttcaagggactggaataaagtggcttacgacctgaaggattctaaaaaaaaaaaaaaaaaaaaa

SEQ ID NO: 749 - protein, 193 aa, Homo sapien
MGKQNSKLRPEVMQDLLESTDFTEHEIQEWYKGFLRDCPSGHLSMEEFKKIYGNFFPYGDASKFAEHVFRTFDANGDGTIDFREFIIALSVTSRGKLEQKLKWAFSMYDLDGNGYISKAEMLVIVQAIYKMVSSVMKMPEDESTPEKRTEKIFRQMDTNRDGKLSLEEFIRGAKSDPSIVRLLQCDPSSAGQF

SEQ ID NO: 750 - DNA, 2508 bp, Rattus norvegicus
cacctcgctgctccagcctctggggcgcattccaaccttccagcctgcgacctgcggagaaaaaaaattacttattttcttgccccatacataccttgaggcgagcaaaaaaattaaattttaaccatgagggaaatcgtgcacatccaggctggtcagtgtggcaaccagatcggtgccaagttctgggaggtgatcagtgatgaacatggcatcgaccccaccggcacctaccacggggacagcgacctgcagctggaccgcatctctgtgtactacaatgaagccacaggtggcaaatatgttcctcgtgccatcctggtggatctagaacctgggaccatggactctgttcgctcaggtccttttggccagatctttagaccagacaactttgtatttggtcagtctggggcaggtaacaactgggccaaaggccactacacagagggcgccgagctggttgattctgtcctggatgtggtacggaaggaggcagagagctgtgactgcctgcagggcttccagctgacccactcactgggcgggggcacaggctctggaatgggcactctccttatcagcaagatccgagaagaataccctgatcgcatcatgaataccttcagtgtggtgccttcacccaaagtgtctgacaccgtggtcgagccctacaatgccaccctctccgtccatcagttggtagagaatactgatgagacctattgcattgacaacgaggccctctatgatatctgcttccgcactctgaagctgaccacaccaacctacggggatctgaaccaccttgtctcagccaccatgagtggtgtcaccacctgcctccgtttccctggccagctcaatgctgacctccgcaagttggcagtcaacatggtccccttcccacgtctccatttctttatgcctggctttgcccctctcaccagccgtggaagccagcagtatcgagctctcacagtgccggaactcacccagcaggtcttcgatgccaagaacatgatggctgcctgtgacccccgccacggccgatacctcaccgtggctgctgtcttccgtggtcggatgtccatgaaggaggtcgatgagcagatgcttaacgtgcagaacaagaacagcagctactttgtggaatggatccccaacaatgtcaagacagccgtctgtgacatcccacctcgtggcctcaagatggcagtcaccttcattggcaatagcacagccatccaggagctcttcaagcgcatctcggagcagttcactgccatgttccgccggaaggccttcctccactggtacacaggcgagggcatggacgagatggagttcaccgaggctgagagcaacatgaacgacctcgtctctgagtatcagcagtaccaggatgccaccgcagaagaggaggaggatttcggtgaggaggccgaagaggaggcctaaggcagagcccccatcacctcaggcttctcagttcccttagccgtcttactcaactgcccctttcctctccctcagaatttgtgtttgctgcctctatcttgttttttgttttttcttctggggggggtctagaacagtgcctggcacatagtaggcgctcaataaatacttgtttgttgaatgtctcctctctctttccactctgggaaacctaggtttctgccattctgggtgaccctgtatttctttctggtgcccattccatttgtccagttaatacttcctcttaaaaatctccaagaagctgggtctccagatcccatttagaaccaaccaggtgctgaaaacacatgtagataatggccatcatcctaagcccaaagtagaaaatggtagaaggtagtgggtagaagtcactatataaggaaggggatgggattttccattctaaaagttttggagagggaaatccaggctattaaagtcactaaatttctaagtatgtccatttcccatctcagcttcaagggaggtgtcagcagtattatctccactttcaatctccctccaagctctactctggaggagtctgtcccactctgtcaagtggaatccttccctttccaactctacctccctcactcagctcctttcccctgatcagagaaagggatcaagggggttgggaggggggaaagagaccagccttggtccctaagcctccagaaacgtcttcttaatccccaccttttcttactcccaaaaaagaatgaacacccctgactctggagtggtgtatactgccacatcagtgtttgagtcagtccccagaggagaggggaaccctcctccatcttttttgcaacatctcatttcttccttttgctgttgcttcccccctcacacacttggttttgttctatcctacatttgagatttctattttatgttgaacttgctgctttttttcatattgaaaagatgacatcgccccaagagccaaaaataaatgggaattgaaaaaaaaaaaaaaaaaaaaaaaaaaaa

SEQ ID NO: 751 - protein, 444 aa, Rattus norvegicus
MREIVHIQAGQCGNQIGAKFWEVISDEHGIDPTGTYHGDSDLQLDRISVYYNEATGGKYVPRAILVDLEPGTMDSVRSGPFGQIFRPDNFVFGQSGAGNNWAKGHYTEGAELVDSVLDVVRKEAESCDCLQGFQLTHSLGGGTGSGMGTLLISKIREEYPDRIMNTFSVVPSPKVSDTVVEPYNATLSVHQLVENTDETYCIDNEALYDICFRTLKLTTPTYGDLNHLVSATMSGVTTCLRFPGQLNADLRKLAVNMVPFPRLHFFMPGFAPLTSRGSQQYRALTVPELTQQVFDAKNMMAACDPRHGRYLTVAAVFRGRMSMKEVDEQMLNVQNKNSSYFVEWIPNNVKTAVCDIPPRGLKMAVTFIGNSTAIQELFKRISEQFTAMFRRKAFLHWYTGEGMDEMEFTEAESNMNDLVSEYQQYQDATAEEEEDFGEEAEEEA

SEQ ID NO: 752 - DNA, 1983 bp, Homo sapien
gaattgaaccacccattttcctttcttagccaaatcaccaaaatgtccagttagaacaagaatttagcattctgcaaaagaagttaacagctgagataacgaggaaatattctgaaatggatcccaaatatttcatcttaattttgttttgtggacacctgaacaatacatttttttcaaagacagagacaattacaacagagaagcagtcacagcctaccttattcacatcatcaatgtcacaggtattggctaattctcaaaacacaacagggaatcctttgggtcaaccaacacaattcagcgacactttttctggacaatcaatatcacctgccaaagtcactgctggacaaccaacaccagctgtctatacctcttctgaaaaaccagaagcacatacttctgctggacaaccacttgcctacaacaccaaacaaccaacaccaatagccaacacctcctcccagcaagccgtgttcacctctgccagacaactaccatctgcccgtacttctaccacacaaccaccaaagtcatttgtctatacttttactcaacaatcatcatctgtccagatcccttctagaaaacaaataactgttcataatccatccacacaaccaacatcaactgtcaaaaattcacctaggagtacaccaggatttatcttagatactaccagtaacaaacaaaccccacaaaaaaacaattataattcaatagctgccatactaattggtgtacttctgacttctatgttggtagctataatcatcattgtactttggaaatgcttaaggaaaccagttttaaatgatcaaaattgggcaggtagatctccatttgctgatggagaaacccctgacatttgtatggataacatcagagaaaatgaaatatccacaaaacgtacatcaatcatttcacttacaccctggaaaccaagcaaaagcacacttttagcagatgacttagaaattaagttgtttgaatcaagtgaaaacattgaagactccaacaaccccaaaacagagaaaataaaagatcaagtaaatggtacatcagaagatagtgctgatggttcaacagttggaactgctgtttcttcttcagatgatgcaggtctgcctccaccacctccccttctggatttggaaggacaggaaagtaaccaatctgacaaacccacaatgacaattgtatctcctcttccaaatgattctactagtctccctccatctctggactgtctcaatcaagactgtggagatcataaatctgagataatacaatcatttccaccgcttgactcacttaacttgcccctgccaccagtagattttatgaaaaaccaagaagattccaaccttgagatccagtgtcaggagttctctattcctcccaactctgatcaagatcttaatgaatccctgccacctccacctgcagaactgttataaatattacaacttgctttttagctgatcttccatcctcaaatgactcttttttctttatatgttaacatatataaaatggcaactgatagtcaattttgatttttattcaggaactatctgaaatctgctcagagcctatgtgcatagatgaaacttttttttaaaaaaagttatttaacagtaatctatttactaattatagtacctatctttaaagtatagtacattttacatatgtaaatggtatgtttcaataatttaagaactctgaaacaatctacatatacttattacccagtacagttttttttcccctgaaaagctgtgtataaaattatggtgaataaacttttatgtttccatttcaaagaccagggtggagaggaataagagactaagtatatgcttcaagttttaaattaatacctcaagtattaaataaatattccaagtttgtgggaatgggagattaaaatgcatgtttgagagtaaaaaaaaaaaaaaaaaaaaaaaaaaaaaa

SEQ ID NO: 753 - protein, 448 aa, Homo sapien
MDPKYFILILFCGHLNNTFFSKTETITTEKQSQPTLFTSSMSQVLANSQNTTGNPLGQPTQFSDTFSGQSISPAKVTAGQPTPAVYTSSEKPEAHTSAGQPLAYNTKQPTPIANTSSQQAVFTSARQLPSARTSTTQPPKSFVYTFTQQSSSVQIPSRKQITVHNPSTQPTSTVKNSPRSTPGFILDTTSNKQTPQKNNYNSIAAILIGVLLTSMLVAIIIIVLWKCLRKPVLNDQNWAGRSPFADGETPDICMDNIRENEISTKRTSIISLTPWKPSKSTLLADDLEIKLFESSENIEDSNNPKTEKIKDQVNGTSEDSADGSTVGTAVSSSDDAGLPPPPPLLDLEGQESNQSDKPTMTIVSPLPNDSTSLPPSLDCLNQDCGDHKSEIIQSFPPLDSLNLPLPPVDFMKNQEDSNLEIQCQEFSIPPNSDQDLNESLPPPPAELL

SEQ ID NO: 754 - DNA, 1350 bp, Homo sapien; identical to SEQ ID NO: 640

SEQ ID NO: 755 - protein, 449 aa, Homo sapien; identical to SEQ ID NO: 641

SEQ ID NO: 756 - DNA, 1976 bp, Homo sapien
gccacacggtctttgagctgagtcgaggtggaccctttgaacgcagtcgccctacagccgctgattccccccgcatcgcctcccgtggaagcccaggcccgcttcgcagctttctccctttgtctcataaccatgtccaccaacgagaatgctaatacaccagctgcccgtcttcacagattcaagaacaagggaaaagacagtacagaaatgaggcgtcgcagaatagaggtcaatgtggagctgaggaaagctaagaaggatgaccagatgctgaagaggagaaatgtaagctcatttcctgatgatgctacttctccgctgcaggaaaaccgcaacaaccagggcactgtaaattggtctgttgatgacattgtcaaaggcataaatagcagcaatgtggaaaatcagctccaagctactcaagctgccaggaaactactttccagagaaaaacagccccccatagacaacataatccgggctggtttgattccgaaatttgtgtccttcttgggcagaactgattgtagtcccattcagtttgaatctgcttgggcactcactaacattgcttctgggacatcagaacaaaccaaggctgtggtagatggaggtgccatcccagcattcatttctctgttggcatctccccatgctcacatcagtgaacaagctgtctgggctctaggaaacattgcaggtgatggctcagtgttccgagacttggttattaagtacggtgcagttgacccactgttggctctccttgcagttcctgatatgtcatctttagcatgtggctacttacgtaatcttacctggacactttctaatctttgccgcaacaagaatcctgcacccccgatagatgctgttgagcagattcttcctaccttagttcggctcctgcatcatgatgatccagaagtgttagcagatacctgctgggctatttcctaccttactgatggtccaaatgaacgaattggcatggtggtgaaaacaggagttgtgccccaacttgtgaagcttctaggagcttctgaattgccaattgtgactcctgccctaagagccatagggaatattgtcactggtacagatgaacagactcaggttgtgattgatgcaggagcactcgccgtctttcccagcctgctcaccaaccccaaaactaacattcagaaggaagctacgtggacaatgtcaaacatcacagccggccgccaggaccagatacagcaagttgtgaatcatggattagtcccattccttgtcagtgttctctctaaggcagattttaagacacaaaaggaagctgtgtgggccgtgaccaactataccagtggtggaacagttgaacagattgtgtaccttgttcactgtggcataatagaaccgttgatgaacctcttaactgcaaaagataccaagattattctggttatcctggatgccatttcaaatatctttcaggctgctgagaaactaggtgaaactgagaaacttagtataatgattgaagaatgtggaggcttagacaaaattgaagctctacaaaaccatgaaaatgagtctgtgtataaggcttcgttaagcttaattgagaagtatttctctgtagaggaagaggaagatcaaaacgttgtaccagaaactacctctgaaggctacactttccaagttcaggatggggctcctgggacctttaacttttagatcatgtagctgagacataaatttgttgtgtactacgtttggtattttgtcttattgtttctctactaagaactctttcttaaatgtggtttgttactgtagcactttttacactgaaactatacttgaacagttccaactgtacatacatactgtatgaagcttgtcctctgactaggtttctaatttctatgtggaatttcctatcttgcagcatcctgtaaataaacattcaagtccacccttaaaaaaaa

SEQ ID NO: 757 - protein, 529 aa, Homo sapien [sequence omitted]

SEQ ID NO: 758 - DNA, 2490 bp, Homo sapien
atggcgaaatataacacggggggcaacccgacagaggatgtctcagtcaatagccgacccttcagagtcacagggccaaactcatcttcaggaatacaagcaagaaagaacttattcaacaaccaaggaaatgccagccctcctgcaggacccagcaatgtacctaagtttgggtccccaaagccacctgtggcagtcaaaccttcttctgaggaaaagcctgacaaggaacccaagcccccgtttctaaagcccactggagcaggccaaagattcggaacaccagccagcttgaccaccagagaccccgaggcgaaagtgggatttctgaaacctgtaggccccaagcccatcaacttgcccaaagaagattccaaacctacatttccctggcctcctggaaacaagccatctcttcacagtgtaaaccaagaccatgacttaaagccactaggcccgaaatctgggcctactcctccaacctcagaaaatgaacagaagcaagcgtttcccaaattgactggggttaaagggaaatttatgtcagcatcacaagatcttgaacccaagcccctcttccccaaacccgcctttggccagaagccgcccctaagtaccgagaactcccatgaagacgaaagccccatgaagaatgtgtcttcatcaaaagggtccccagctcccctgggagtcaggtccaaaagcggccctttaaaaccagcaagggaagactcagaaaataaagaccatgcaggggagatttcaagtttgccctttcctggagtggttttgaaacctgctgcgagcaggggaggcccaggtctctccaaaaatggtgaagaaaaaaaggaagataggaagatagatgctgctaagaacaccttccagagcaaaataaatcaggaagagttggcctcagggactcctcctgccaggttccctaaggccccttctaagctgacagtgggggggccatggggccaaagtcaggaaaaggaaaagggagacaagaattcagccaccccgaaacagaagccattgcctcccttgtttaccttgggtccacctccaccaaaacccaacagaccaccaaatgttgacctgacgaaattccacaaaacctcttctggaaacagtactagcaaaggccagacgtcttactcaacaacttccctgccaccacctccaccatcccatccggccagccaaccaccattgccagcatctcacccatcacaaccaccagtcccaagcctacctcccagaaacattaaacctccgtttgacctaaaaagtcctgtcaatgaagacaatcaagatggtgtcacgcactctgatggtgctggaaatctagatgaggaacaagacagtgaaggagaaacatatgaagacatagaagcatccaaagaaagagagaagaaaagggaaaaggaagaaaagaagaggttagagctggagaaaaaggaacagaaagagaaagaaaagaaagaacaagaaataaagaagaaatttaaactaacaggccctattcaagtcatccatcttgcaaaagcttgttgtgatgtcaaaggaggaaagaatgaactgagcttcaagcaaggagagcaaattgaaatcatccgcatcacagacaacccagaaggaaaatggttgggcagaacagcaaggggttcatatggctatattaaaacaactgctgtagagattgactatgattctttgaaactgaaaaaagactctcttggtgccccttcaagacctattgaagatgaccaagaagtatatgatgatgttgcagagcaggatgatattagcagccacagtcagagtggaagtggagggatattccctccaccaccagatgatgacatttatgatgggattgaagaggaagatgctgatgatggctccacactacaggttcaagagaagagtaatacgtggtcctgggggattttgaagatgttaaagggaaaagatgacagaaagaaaagtatacgagagaaacctaaagtctctgactcagacaataatgaaggttcatctttccctgctcctcctaaacaattggacatgggagatgaagtttacgatgatgtggatacctctgatttccctgtttcatcagcagagatgagtcaaggaactaattttggaaaagctaagacagaagaaaaggaccttaagaagctaaaaaagcaggaaaaagaagaaaaagacttcaggaaaaaatttaaatatgatggtgaaattagagtcctatattcaactaaagttacaacttccataacttctaaaaagtggggaaccagagatctacaggtaaaacctggtgaatctctagaagttatacaaaccacagatgacacaaaagttctctgcagaaatgaagaagggaaatatggttatgtccttcggagttacctagcggacaatgatggagagatctatgatgatattgctgatggctgcatctatgacaatgactag

SEQ ID NO: 759 - protein, 829 aa, Homo sapien
MAKYNTGGNPTEDVSVNSRPFRVTGPNSSSGIQARKNLFNNQGNASPPAGPSNVPKFGSPKPPVAVKPSSEEKPDKEPKPPFLKPTGAGQRFGTPASLTTRDPEAKVGFLKPVGPKPINLPKEDSKPTFPWPPGNKPSLHSVNQDHDLKPLGPKSGPTPPTSENEQKQAFPKLTGVKGKFMSASQDLEPKPLFPKPAFGQKPPLSTENSHEDESPMKNVSSSKGSPAPLGVRSKSGPLKPAREDSENKDHAGEISSLPFPGVVLKPAASRGGPGLSKNGEEKKEDRKIDAAKNTFQSKINQEELASGTPPARFPKAPSKLTVGGPWGQSQEKEKGDKNSATPKQKPLPPLFTLGPPPPKPNRPPNVDLTKFHKTSSGNSTSKGQTSYSTTSLPPPPPSHPASQPPLPASHPSQPPVPSLPPRNIKPPFDLKSPVNEDNQDGVTHSDGAGNLDEEQDSEGETYEDIEASKEREKKREKEEKKRLELEKKEQKEKEKKEQEIKKKFKLTGPIQVIHLAKACCDVKGGKNELSFKQGEQIEIIRITDNPEGKWLGRTARGSYGYIKTTAVEIDYDSLKLKKDSLGAPSRPIEDDQEVYDDVAEQDDISSHSQSGSGGIFPPPPDDDIYDGIEEEDADDGSTLQVQEKSNTWSWGILKMLKGKDDRKKSIREKPKVSDSDNNEGSSFPAPPKQLDMGDEVYDDVDTSDFPVSSAEMSQGTNFGKAKTEEKDLKKLKKQEKEEKDFRKKFKYDGEIRVLYSTKVTTSITSKKWGTRDLQVKPGESLEVIQTTDDTKVLCRNEEGKYGYVLRSYLADNDGEIYDDIADGCIYDND

SEQ ID NO: 760 - DNA, 2400 bp, Homo sapien; identical to SEQ ID NO: 442

SEQ ID NO: 761 - protein, 783 aa, Homo sapien; identical to SEQ ID NO: 443

SEQ ID NO: 762 - DNA, 5458 bp, Homo sapien
gccccagggcctggagaggtctgaagaaacctgggagccagcagcccggggctccactctgggttctgaaagcccattccctgctctgcggctcctcccaccccacctcttctcagccttgcagctcaagggttgatctcaggagtccaggacccaggagagggaagaatctgaggaacacagaacagtgagcgttgcccacaccccatctcccgtcaccacatctcccctcaccctcaccctccctgcctggccctggaccccatcccaggacctccctatcagctgacttcttccagtgtcttgcaggcccctctgggctcctccctcccctggcttttcctaccactccccctctatcggcgtctatctgtaggtgccctgggatttataaaactgggttccgaatgctgaataagagacggtaagagccaaggcaaaggacagcactgttctctgcctgcctgataccctcaccacctgggaacatcccccagacaccctcttaactccgggacagagatggctggcggagcctggggccgcctggcctgttacttggagttcctgaagaaggaggagctgaaggagttccagcttctgctcgccaataaagcgcactccaggagctcttcgggtgagacacccgctcagccagagaagacgagtggcatggaggtggcctcgtacctggtggctcagtatggggagcagcgggcctgggacctagccctccatacctgggagcagatggggctgaggtcactgtgcgcccaagcccaggaaggggcaggccactctccctcattcccctacagcccaagtgaaccccacctggggtctcccagccaacccacctccaccgcagtgctaatgccctggatccatgaattgccggcggggtgcacccagggctcagagagaagggttttgagacagctgcctgacacatctggacgccgctggagagaaatctctgcctcactcctctaccaagctcttccaagctccccagaccatgagtctccaagccaggagtcacccaacgcccccacatccacagcagtgctggggagctggggatccccacctcagcccagcctagcacccagagagcaggaggctcctgggacccaatggcctctggatgaaacgtcaggaatttactacacagaaatcagagaaagagagagagagaaatcagagaaaggcaggcccccatgggcagcggtggtaggaacgcccccacaggcgcacaccagcctacagccccaccaccacccatgggagccttctgtgagagagagcctctgttccacatggccctggaaaaatgaggattttaaccaaaaattcacacagctgctacttctacaaagacctcaccccagaagccaagatcccctggtcaagagaagctggcctgattatgtggaggagaatcgaggacatttaattgagatcagagacttatttggcccaggcctggatacccaagaacctcgcatagtcatactgcagggggctgctggaattgggaagtcaacactggccaggcaggtgaaggaagcctgggggagaggccagctgtatggggaccgcttccagcatgtcttctacttcagctgcagagagctggcccagtccaaggtggtgagtctcgctgagctcatcggaaaagatgggacagccactccggctcccattagacagatcctgtctaggccagagcggctgctcttcatcctcgatggtgtagatgagccaggatgggtcttgcaggagccgagttctgagctctgtctgcactggagccagccacagccggcggatgcactgctgggcagtttgctggggaaaactatacttcccgaggcatccttcctgatcacggctcggaccacagctctgcagaacctcattccttctttggagcaggcacgttgggtagaggtcctggggttctctgagtccagcaggaaggaatatttctacagatatttcacagatgaaaggcaagcaattagagcctttaggttggtcaaatcaaacaaagagctctgggccctgtgtcttgtgccctgggtgtcctggctggcctgcacttgcctgatgcagcagatgaagcggaaggaaaaactcacactgacttccaagaccaccacaaccctctgtctacattaccttgcccaggctctccaagctcagccattgggaccccagctcagagacctctgctctctggctgctgagggcatctggcaaaaaaagacccttttcagtccagatgacctcaggaagcatgggttagatggggccatcatctccaccttcttgaagatgggtattcttcaagagcaccccatccctctgagctacagcttcattcacctctgtttccaagagttctttgcagcaatgtcctatgtcttggaggatgagaaggggagaggtaaacattctaattgcatcatagatttggaaaagacgctagaagcatatggaatacatggcctgtttggggcatcaaccacacgtttcctattgggcctgttaagtgatgagggggagagagagatggagaacatctttcactgccggctgtctcaggggaggaacctgatgcagtgggtcccgtccctgcagctgctgctgcagccacactctctggagtccctccactgcttgtacgagactcggaacaaaacgttcctgacacaagtgatggcccatttcgaagaaatgggcatgtgtgtagaaacagacatggagctcttagtgtgcactttctgcattaaattcagccgccacgtgaagaagcttcagctgattgagggcaggcagcacagatcaacatggagccccaccatggtagtcctgttcaggtgggtcccagtcacagatgcctattggcagattctcttctccgtcctcaaggtcaccagaaacctgaaggagctggacctaagtggaaactcgctgagccactctgcagtgaagagtctttgtaagaccctgagacgccctcgctgcctcctggagaccctgcggttggctggctgtggcctcacagctgaggactgcaaggaccttgcctttgggctgagagccaaccagaccctgaccgagctggacctgagcttcaatgtgctcacggatgctggagccaaacacctttgccagagactgagacagccgagctgcaagctacagcgactgcagctggtcagctgtggcctcacgtctgactgctgccaggacctggcctctgtgcttagtgccagccccagcctgaaggagctagacctgcagcagaacaacctggatgacgttggcgtgcgactgctctgtgaggggctcaggcatcctgcctgcaaactcatacgcctggggctggaccagacaactctgagtgatgagatgaggcaggaactgagggccctggagcaggagaaacctcagctgctcatcttcagcagacggaaaccaagtgtgatgacccctactgagggcctggatacgggagagatgagtaatagcacatcctcactcaagcggcagagactcggatcagagagggcggcttcccatgttgctcaggctaatctcaaactcctggacgtgagcaagatcttcccaattgctgagattgcagaggaaagctccccagaggtagtaccggtggaactcttgtgcgtgccttctcctgcctctcaaggggacctgcatacgaagcctttggggactgacgatgacttctggggccccacggggcctgtggctactgaggtagttgacaaagaaaagaacttgtaccgagttcacttccctgtagctggctcctaccgctggcccaacacgggtctctgctttgtgatgagagaagcggtgaccgttgagattgaattctgtgtgtgggaccagttcctgggtgagatcaacccacagcacagctggatggtggcagggcctctgctggacatcaaggctgagcctggagctgtggaagctgtgcacctccctcactttgtggctctccaagggggccatgtggacacatccctgttccaaatggcccactttaaagaggaggggatgctcctggagaagccagccagggtggagctgcatcacatagttctggaaaaccccagcttctcccccttgggagtcctcctgaaaatgatccataatgccctgcgcttcattcccgtcacctctgtggtgttgctttaccaccgcgtccatcctgaggaagtcaccttccacctctacctgatcccaagtgactgctccattcggaaggaactggagctctgctatcgaagccctggagaagaccagctgttctcggagttctacgttggccacttgggatcagggatcaggctgcaagtgaaagacaagaaagatgagactctggtgtgggaggccttggtgaaaccaggagatctcatgcctgcaactactctgatccctccagcccgcatagccgtaccttcacctctggatgccccgcagttgctgcactttgtggaccagtatcgagagcagctgatagcccgagtgacatcggtggaggttgtcttggacaaactgcatggacaggtgctgagccaggagcagtacgagagggtgctggctgagaacacgaggcccagccagatgcggaagctgttcagcttgagccagtcctgggaccggaagtgcaaagatggactctaccaagccctgaaggagacccatcctcacctcattatggaactctgggagaagggcagcaaaaagggactcctgccactcagcagctgaagtatcaacaccagcccttgacccttgagtcctggctttggctgacccttctttgggtctcagtttctttctctgcaaacaagttgccatctggtttgccttccagcactaaagtaatggaactttgatgatgcctttgctgggcattatgtgtccatgccagggatgccacagggggccccagtccaggtggcctaacagcatctcagggaatgtccatctggagctggcaagacccctgcagacctcatagagcctcatctggtggccacagcagccaagcctagagccctccggatcccatccaggcgcaaagaggaataggagggacatggaaccatttgcctctggctgtgtcacagggtgagccccaaaattggggttcagcgtgggaggccacgtggattcttggctttgtacaggaagatctacaagagcaagccaacagagtaaagtggaaggaagtttattcagaaaataaaggagtatcacagctcttttagaatttgtctagcaggctttccagtttttaccagaaaacccctataaattaaaaattttttacttaaatttaagaattaaaaaaatacaaaaaagaaaaaatgaaaataaaggaataagaagttacctactccaaaaaaaaaaa

SEQ ID NO: 763 - protein, 1429 aa, Homo sapien
MAGGAWGRLACYLEFLKKEELKEFQLLLANKAHSRSSSGETPAQPEKTSGMEVASYLVAQYGEQRAWDLALHTWEQMGLRSLCAQAQEGAGHSPSFPYSPSEPHLGSPSQPTSTAVLMPWIHELPAGCTQGSERRVLRQLPDTSGRRWREISASLLYQALPSSPDHESPSQESPNAPTSTAVLGSWGSPPQPSLAPREQEAPGTQWPLDETSGIYYTEIREREREKSEKGRPPWAAVVGTPPQAHTSLQPHHHPWEPSVRESLCSTWPWKNEDFNQKFTQLLLLQRPHPRSQDPLVKRSWPDYVEENRGHLIEIRDLFGPGLDTQEPRIVILQGAAGIGKSTLARQVKEAWGRGQLYGDRFQHVFYFSCRELAQSKVVSLAELIGKDGTATPAPIRQILSRPERLLFILDGVDEPGWVLQEPSSELCLHWSQPQPADALLGSLLGKTILPEASFLITARTTALQNLIPSLEQARWVEVLGFSESSRKEYFYRYFTDERQAIRAFRLVKSNKELWALCLVPWVSWLACTCLMQQMKRKEKLTLTSKTTTTLCLHYLAQALQAQPLGPQLRDLCSLAAEGIWQKKTLFSPDDLRKHGLDGAIISTFLKMGILQEHPIPLSYSFIHLCFQEFFAAMSYVLEDEKGRGKHSNCIIDLEKTLEAYGIHGLFGASTTRFLLGLLSDEGEREMENIFHCRLSQGRNLMQWVPSLQLLLQPHSLESLHCLYETRNKTFLTQVMAHFEEMGMCVETDMELLVCTFCIKFSRHVKKLQLIEGRQHRSTWSPTMVVLFRWVPVTDAYWQILFSVLKVTRNLKELDLSGNSLSHSAVKSLCKTLRRPRCLLETLRLAGCGLTAEDCKDLAFGLRANQTLTELDLSFNVLTDAGAKHLCQRLRQPSCKLQRLQLVSCGLTSDCCQDLASVLSASPSLKELDLQQNNLDDVGVRLLCEGLRHPACKLIRLGLDQTTLSDEMRQELRALEQEKPQLLIFSRRKPSVMTPTEGLDTGEMSNSTSSLKRQRLGSERAASHVAQANLKLLDVSKIFPIAEIAEESSPEVVPVELLCVPSPASQGDLHTKPLGTDDDFWGPTGPVATEVVDKEKNLYRVHFPVAGSYRWPNTGLCFVMREAVTVEIEFCVWDQFLGEINPQHSWMVAGPLLDIKAEPGAVEAVHLPHFVALQGGHVDTSLFQMAHFKEEGMLLEKPARVELHHIVLENPSFSPLGVLLKMIHNALRFIPVTSVVLLYHRVHPEEVTFHLYLIPSDCSIRKELELCYRSPGEDQLFSEFYVGHLGSGIRLQVKDKKDETLVWEALVKPGDLMPATTLIPPARIAVPSPLDAPQLLHFVDQYREQLIARVTSVEVVLDKLHGQVLSQEQYERVLAENTRPSQMRKLFSLSQSWDRKCKDGLYQALKETHPHLIMELWEKGSKKGLLPLSS

SEQ ID NO: 764 - DNA, 2373 bp, Homo sapien
aacgttcctgacacaagtgatggcccatttcgaagaaatgggcatgtgtgtagaaacagacatggagctcttagtgtgcactttctgcattaaattcagccgccacgtgaagaagcttcagctgattgagggcaggcagcacagatcaacatggagccccaccatggtagtcctgttcaggtgggtcccagtcacagatgcctattggcagattctcttctccgtcctcaaggtcaccagaaacctgaaggagctggacctaagtggaaactcgctgagccactctgcagtgaagagtctttgtaagaccctgagacgccctcgctgcctcctggagaccctgcggttggctggctgtggcctcacagctgaggactgcaaggaccttgcctttgggctgagagccaaccagaccctgaccgagctggacctgagcttcaatgtgctcacggatgctggagccaaacacctttgccagagactgagacagccgagctgcaagctacagcgactgcagctggtcagctgtggcctcacgtctgactgctgccaggacctggcctctgtgcttagtgccagccccacctgaaggagctagacctgcagcagaacaacctggatgacgttcgcgtgcgactgctctgtgaggggctcaggcatcctgcctgcaaactcatacgcctggggctggaccagacaactctgagtgatgagatgaggcaggaactgagggccctggagcaggagaaacctcagctgctcatcttcagcagacggaaaccaagtgtgatgacccctactgagggcctggatacgggagagatgagtaatagcacatcctcactcaagcggcagagactcggatcagagagggcggcttcccatgttgctcaggctaatctcaaactcctggacgtgagcaagatcttcccaattgctgagattgcaggcaagagccacgaggaaagctccccagaggtagtaccggtggaactcttgtgcgtgccttctcctgcctctcaaggggacctgcatacgaagcctttggggactgacgatgacttctggggccccacggggcctgtggctactgaggtagttgacaaagaaaagaacttgtaccgagttcacttccctgtagctggctcctaccgctggcccaacacgggtctctgctttgtgatgagagaagcggtgaccgttgagattgaattctgtgtgtgggaccagttcctgggtgagatcaacccacagcacagctggatggtggcagggcctctgctggacatcaaggctgagcctggagctgtggaagctgtgcacctccctcactttgtggctctccaagggggccatgtggacacatccctgttccaaatggcccactttaaagaggaggggatgctcctggagaagccagccagggtggagctgcatcacatagttctggaaaaccccagcttctcccccttgggagtcctcctgaaaatgatccataatgccctgcgcttcattcccgtcacctctgtggtgttgctttaccaccgcgtccatcctgaggaagtcaccttccacctctacctgatcccaagtgactgctccattcggaaggccatagatgatctagaaatgaaattccagtttgtgcgaatccacaagccacccccgctgaccccactttatatgggctgtcgttacactgtgtctgggtctggttcagggatgctggaaatactccccaaggaactggagctctgctatcgaagccctggagaagaccagctgttctcggagttctacgttggccacttgggatcagggatcaggctgcaagtgaaagacaagaaagatgagactctggtgtgggaggccttggtgaaaccaggaaggaacaccagccagccgtggaacctcaggtgcaacagagacgccaggagatactagtgcccagcagcctgcggcagtaccaatgaagccagagagggcttggtggatgacaaggaggcctgagtagaccgcaggtgggtctgagaaatgggcttaggtgaggcaggtctttgaaggatttgttcttaatcatatgcgagatgctcaaaaggctggatgcctgcttttgtgggtgaagagcaagaagagaaaacaggttgtacacatacagatgcagatggagagacagagaaaaaaaaggaagaaggcagagaaatgcaccaattcttgagctgtattatctctggaccttgggattgtgggaggctttattttactactgattttgcctacactgttttctcaatttctagttttctacaaagatgatgtgttagctttttcacgcaaaaagattaaaatttaaaaaaaaaaaaaaaaaaaaaa

SEQ ID NO: 765 - protein, 409 aa, Homo sapien
MRQELRALEQEKPQLLIFSRRKPSVMTPTEGLDTGEMSNSTSSLKRQRLGSERAASHVAQANLKLLDVSKIFPIAEIAGKSHEESSPEVVPVELLCVPSPASQGDLHTKPLGTDDDFWGPTGPVATEVVDKEKNLYRVHFPVAGSYRWPNTGLCFVMREAVTVEIEFCVWDQFLGEINPQHSWMVAGPLLDIKAEPGAVEAVHLPHFVALQGGHVDTSLFQMAHFKEEGMLLEKPARVELHHIVLENPSFSPLGVLLKMIHNALRFIPVTSVVLLYHRVHPEEVTFHLYLIPSDCSIRKAIDDLEMKFQFVRIHKPPPLTPLYMGCRYTVSGSGSGMLEILPKELELCYRSPGEDQLFSEFYVGHLGSGIRLQVKDKKDETLVWEALVKPGRNTSQPWNLRCNRDARRY

SEQ ID NO: 766 - DNA, 2957 bp, Homo sapien; identical to SEQ ID NO: 372

SEQ ID NO: 767 - protein, 452 aa, Homo sapien; identical to SEQ ID NO: 373

SEQ ID NO: 768 - DNA, 1679 bp, Homo sapien; identical to SEQ ID NO: 628

SEQ ID NO: 769 - protein, 352 aa, Homo sapien; identical to SEQ ID NO: 629

SEQ ID NO: 770 - DNA, 2279 bp, Homo sapien; identical to SEQ ID NO: 120

SEQ ID NO: 771 - protein, 527 aa, Homo sapien; identical to SEQ ID NO: 121

SEQ ID NO: 772 - DNA, 3925 bp, Homo sapien
acagcacagacagattgacctattggggtgtttcgcgagtgtgagagggaagcgccgcggcctgtatttctagacctgcccttcgcctggttcgtggcgccttgtgaccccgggcccctgccgcctgcaagtcggaaattgcgctgtgctcctgtgctacggcctgtggctggactgcctgctgctgcccaactggctggcaagatgaagctctccctggtggccgcgatgctgctgctgctcagcgcggcgcgggccgaggaggaggacaagaaggaggacgtgggcacggtggtcggcatcgacctggggaccacctactcctgcgtcggcgtgttcaagaacggccgcgtggagatcatcgccaacgatcagggcaaccgcatcacgccgtcctatgtcgccttcactcctgaaggggaacgtctgattggcgatgccgccaagaaccagctcacctccaaccccgagaacacggtctttgacgccaagcggctcatcggccgcacgtggaatgacccgtctgtgcagcaggacatcaagttcttgccgttcaaggtggttgaaaagaaaactaaaccatacattcaagttgatattggaggtgggcaaacaaagacatttgctcctgaagaaatttctgccatggttctcactaaaatgaaagaaaccgctgaggcttatttgggaaagaaggttacccatgcagttgttactgtaccagcctattttaatgatgcccaacgccaagcaaccaaagacgctggaactattgctggcctaaatgttatgaggatcatcaacgagcctacggcagctgctattgcttatggcctggataagagggagggggagaagaacatcctggtgtttgacctgggtggcggaaccttcgatgtgtctcttctcaccattgacaatggtgtcttcgaagttgtggccactaatggagatactcatctgggtggagaagactttgaccagcgtgtcatggaacacttcatcaaactgtacaaaaagaagacgggcaaagatgtcaggaaagacaatagagctgtgcagaaactccggcgcgaggtagaaaaggccaaacgggccctgtcttctcagcatcaagcaagaattgaaattgagtccttctatgaaggagaagacttttctgagaccctgactcgggccaaatttgaagagctcaacatggatctgttccggtctactatgaagcccgtccagaaagtgttggaagattctgatttgaagaagtctgatattgatgaaattgttcttgttggtggctcgactcgaattccaaagattcagcaactggttaaagagttcttcaatggcaaggaaccatcccgtggcataaacccagatgaagctgtagcgtatggtgctgctgtccaggctggtgtgctctctggtgatcaagatacaggtgacctggtactgcttgatgtatgtccccttacacttggtattgaaactgtgggaggtgtcatgaccaaactgattccaaggaacacagtggtgcctaccaagaagtctcagatcttttctacagcttctgataatcaaccaactgttacaatcaaggtctatgaaggtgaaagacccctgacaaaagacaatcatcttctgggtacatttgatctgactggaattcctcctgctcctcgtggggtcccacagattgaagtcacctttgagatagatgtgaatggtattcttcgagtgacagctgaagacaagggtacagggaacaaaaataagatcacaatcaccaatgaccagaatcgcctgacacctgaagaaatcgaaaggatggttaatgatgctgagaagtttgctgaggaagacaaaaagctcaaggagcgcattgatactagaaatgagttggaaagctatgcctattctctaaagaatcagattggagataaagaaaagctgggaggtaaactttcctctgaagataaggagaccatggaaaaagctgtagaagaaaagattgaatggctggaaagccaccaagatgctgacattgaagacttcaaagctaagaagaaggaactggaagaaattgttcaaccaattatcagcaaactctatggaagtgcaggccctcccccaactggtgaagaggatacagcagaaaaagatgagttgtagacactgatctgctagtgctgtaatattgtaaatactggactcaggaacttttgttaggaaaaaattgaaagaacttaagtctcgaatgtaattggaatcttcacctcagagtggagttgaaactgctatagcctaagcggctgtttactgcttttcattagcagttgctcacatgtctttgggtgggggggagaagaagaattggccatcttaaaaagcaggtaaaaaacctgggttagggtgtgtgttcaccttcaaaatgttctatttaacaactgggtcatgtgcatctggtgtaggaagttttttctaccataagtgacaccaataaatgtttgttatttacactggtctaatgtttgtgagaagcttctaattagatcaattacttattttaggaaatttaagactagatactcgtgtgtggggtgaggggagggagtatttggtatgttgggataaggaaacacttctatttaatgcttccagggattttttttttttttttttaaccctcctgggcccaagtgatccttccacctcagtctcccagctaattgagaccacaggcttgttaccaccatgctcggcttttgcattaatctaagaaaaggggagagaagttaatccacatctttactcaggcaaggggcatttcacagtgcccaagagtggggttttcttgaacatacttggtttcctatttccccttatctttctaaaactgcctttctggtggctttttttaaaattattactaatgatgcttttatagctgcttggattctctgagaaatgatggggagtgagtgatcactggtattaactttatacacttggatttcatttgtaactttaggatgtaaaggtatattgtgaaccctagctgtgtcagaatctccatccctgaaatttctcattagtggtactggggtgggatcttggatggtgacattgaaactacactaaatcccctcactatgaatgggttgttaaaggcaatggtttgtgtcaaaactggtttaggattacttagattgtgttcctgaagaaaagagtccaggtaaatggtatgatcaataaaggacaggctggtgctaacataaaatccaatattgtaatcctagcactttgggaggccaaggcgggtggatcacaaggtcaagagatagagaccatctttgccaacatggtgaaactccatctctactgaaaatacaaaaattagctgggcgtggtagtgcaagctgaaggctgaggcaggagaatcactcgaacccgggaggcagaggttgcagtgagccgagatcacaccactgtactccagcccggcactccagcctggcgacaagagtgagactccacctcaaaaaaaaaaaaaagaatccaatactgcccaaggataggtattttatagatgggcaactggctgaaaggttaattctctagggctagtagaactggatcccaacaccaaactcttaattagacctaggcctcagctgcactgcccgaaaagcatttgggcagaccctgagcagaatactggtctcaggccaagcccaatacagccattaaagatgacctacagtgctgtgtaccctggggcaatagggttaaatggtagttagcaactagggctagtcttcccttacctcaaaggctctcactaccgtggaccacctagtctgtaactctttctgaggagctgttactgaatattaaaaagatagacttcaaaaaaaaaaaaaaaaaa

SEQ ID NO: 773 - protein, 654 aa, Homo sapien
MKLSLVAAMLLLLSAARAEEEDKKEDVGTVVGIDLGTTYSCVGVFKNGRVEIIANDQGNRITPSYVAFTPEGERLIGDAAKNQLTSNPENTVFDAKRLIGRTWNDPSVQQDIKFLPFKVVEKKTKPYIQVDIGGGQTKTFAPEEISAMVLTKMKETAEAYLGKKVTHAVVTVPAYFNDAQRQATKDAGTIAGLNVMRIINEPTAAAIAYGLDKREGEKNILVFDLGGGTFDVSLLTIDNGVFEVVATNGDTHLGGEDFDQRVMEHFIKLYKKKTGKDVRKDNRAVQKLRREVEKAKRALSSQHQARIEIESFYEGEDFSETLTRAKFEELNMDLFRSTMKPVQKVLEDSDLKKSDIDEIVLVGGSTRIPKIQQLVKEFFNGKEPSRGINPDEAVAYGAAVQAGVLSGDQDTGDLVLLDVCPLTLGIETVGGVMTKLIPRNTVVPTKKSQIFSTASDNQPTVTIKVYEGERPLTKDNHLLGTFDLTGIPPAPRGVPQIEVTFEIDVNGILRVTAEDKGTGNKNKITITNDQNRLTPEEIERMVNDAEKFAEEDKKLKERIDTRNELESYAYSLKNQIGDKEKLGGKLSSEDKETMEKAVEEKIEWLESHQDADIEDFKAKKKELEEIVQPIISKLYGSAGPPPTGEEDTAEKDEL

SEQ ID NO: 774 - DNA, 4826 bp, Homo sapien
tctcactatagggctcgagcggccgcccgggcaggtctgaccacagtggttccggggagaagccttccaggacccatgtgtaggcacaactgttttccctgatcaggatacttccggcactcaacagaggaaagaaattcctaagggaacactgctcagaaagtactgcagcatgtcttcaaatgcctgaggatcaagttggaaaactagaagcaacagaaaacacaataagcgcaatggcggcggccgcggcggagcagcaacagttctacctgctgctgggaaacctgctcagccccgacaatgtggtccggaaacaggcagaggaaacctatgagaatatcccaggccagtcaaagatcacattcctcttacaagccatcagaaatacaacagctgctgaagaggctagacaaatggccgccgttctcctaagacgtctcttgtcctctgcatttgatgaagtctatccagcacttccctctgatgttcagactgccatcaagagtgagctactcatgattattcagatggaaacacaatctagcatgaggaaaaaagtttgtgatattgcggcagaactggccaggaatttaatagatgaggatggcaataaccagtggcccgaaggtttgaagttcctttttgattcagtcagctctcaaaatgtgggactgcgggaagctgcccttcacattttctggaactttcctggaatttttgggaaccagcaacaacactatttagatgtcatcaaacgaatgttagttcagtgtatgcaagatcaggaacacccgtcgatcaggacgttatctgctagagctacagctgcatttatacttgcaaatgagcataatgttgctctgttcaaacattttgcagacttgctaccgggattcctacaggcggtaaatgactcgtgctaccagaatgatgattctgtcctaaaatccctcgttgagattgcagatactgttccaaagtatttgcgtcctcacttggaagcaactctacagctaagtctaaagttgtgtggagacactagcctcaacaatatgcaacgccagcttgcccttgaagtgatcgtcaccctctctgagactgcagctgctatgttaagaaaacataccaatattgttgcacagactattcctcagatgttagcaatgatggttgatttggaagaagatgaggactgggcaaatgcagatgaactagaagatgatgattttgacagcaatgcagttgcaggcgagagtgctctagatcgaatggcttgcggacttggtggaaagctcgttctgccgatgatcaaggaacacattatgcaaatgcttcaaaatcctgactggaaataccggcatgcaggattgatggccttatctgccattggtgaagggtgccaccagcaaatggaaggaattctaaatgagatcgtaaattttgttttactttttctccaggatcctcatccaagagtaaggtatgcagcctgtaatgccgtgggacagatggctacagattttgcacctggtttccaaaagaaatttcatgagaaggtgattgcagctctgctgcagaccatggaagaccaaggcaatcaacgtgtgcaggcccatgcagctgctgccctcattaactttactgaagactgtcccaagtcactacttattccatacttggataatttggtgaaacatctgcattccattatggtactgaagcttcaagagctgattcagaaaggcaccaagttagttttggaacaagttgtgacatccattgcatcagttgccgatactgcagaagaaaaatttgtcccctactatgatttatttatgccatcactgaagcacatcgttgagaatgcggttcaaaaagaactgagacttctgagaggaaaaactattgaatgcattagcctcattggtctggctgttgggaaggaaaaattcatgcaggatgcatcagatgtgatgcagcttttgttaaagacccagacagacttcaatgatatggaagatgatgatcctcagatctcttacatgatctcagcatgggccagaatgtgcaaaatccttggaaaagaatttcagcaataccttccagtggttatggggcctttaatgaagacggcttcaattaagcccgaagtagcccttttagatacccaagacatggagaatatgagtgatgatgatggttgggaatttgtgaaccttggagatcagcaaagctttggtattaaaactgcaggactagaagaaaaatcaactgcttgccagatgttggtttgctatgctaaggagttaaaggaaggctttgtggagtacaccgaacaggttgtcaaactgatggtccctttactgaaattttatttccacgatggtgttcgagtggcagcagcggaatccatgcctcttctcctggagtgtgcaagagtccgtggtcctgagtatctcacacagatgtggcattttatgtgtgatgctctaattaaggccattggtacagaaccagattcagacgtcctctcagaaataatgcattcttttgcaaagtgcattgaagtaatgggagatggatgccttaataatgaacactttgaagaactgggaggtatattgaaagcaaagcttgaagaacattttaaaaatcaagaattacgacaagttaaaagacaagatgaagactatgatgaacaggtcgaagagtcactacaagatgaggatgataatgatgtttatattctgaccaaagtgtcagatattttacactcaatattcagtagctacaaagaaaaggtgttaccatggtttgaacagctgcttccattaattgtcaacctcatttgtccacatagaccatggccagacagacaatggggattatgcatctttgatgatgtcatagaacactgtagtccagcctcatttaaatacgcagaatatttcttaagaccaatgctccaatatgtatgtgacaacagcccagaagtcaggcaagcagctgcatatggcctgggagtcatggcacagtacggtggagataattatcgccctttttgtacagaagcacttcccctgctggtaagagttattcagtctgcggattctaagaccaaagaaaatgtcaatgctacagagaactgcatctcagcagtagggaaaatcatgaagttcaagcctgactgtgtaaacgttgaagaggtccttccacactggttgtcttggcttccactacatgaagataaagaagaagctgttcagactttcaattatctgtgtgacctgattgaaagtaatcatccaattgttcttggcccaaacaataccaatctgcccaaaatatttagtataattgcggaaggagaaatgcacgaggcaattaaacatgaagatccttgtgccaaacgtctggccaatgtcgttcgccaagtacagacttctggaggactgtggactgagtgcatagcacagctcagtcctgagcagcaggccgccattcaggagctcctgaactctgcgtgaagggccttaatgtcacccaccagaaaactaactccaaataaacgcttaccctttcctttaggtttctttgttttgtttttgagcaaaagagatcggtagtgttgtgtgtaggccattcttctggagagccacaagcaggaagagcagcgctgtgttgcagaatggagtttccatggatttctaccagaccactgaaggagttcctggaagccctgcgtacgtagcactgaagactatttttctattggtataacccgcccacctgaaggggaaagggaaatcaaattaatttttctcgttagacataaggaaatttaaggaaaaacagctttaagaacagttactcagcgtagatgtgtgttcacacaaattgccttgcattcagtgttcattgtgaattgggagtgtgagtctttctgtagggtacaaagaagcctcctacccagcaaaccagtagacccaaaagttgaaaaaaactggatgacagacaacaagcatgaagatggcatatttgatgtcactttggttctttttcccagaaggcttatacagtgactcagtcgggaagctttccagcttcagcccttgaatgtgaagtgtcattggcatgtctggcagtagtctctcattcactcccaataaacaacattgaatacaaaagaggcttgtgtaaaaactcagtactgtctggcttggattcatttcatgttttttaatataagaatgatctaatatttttttaaagtaatagctatcagtaatagctgagtgttttttcccctaatattttccttgtgcaattcagacttaagcatcgagtttttaccatcttccactttaagctaagttatgatacctattccattcacaattggtgttctttttaaggtttgcaaatttcagccaattttgtagctaagattgttctgatcagctcaaaaagatttggcttagtgttttcattgcaaattataattgctgtagagccacacacaacttttgaacttttaattataagtgttatggctaaagttatttactgaaaatttcagtaaaatgtgtgaatgtttctttatgtattaacctcatagcagtaaatgacttgctgttgtttaatttttctaaggcatcttaatagacttctcttggaaaaacctttccaaggtgttaacatttttatagtttgtactaaatttaaccgtgatataaaaatgaattttatgcatagatcagaattttaaattaaaggttttttctttaaaaaaaaaaaaaaaaaaaaaaaaaaaaaaaaaaaaa

SEQ ID NO: 775 - protein, 1097 aa, Homo sapien
MAAAAAEQQQFYLLLGNLLSPDNVVRKQAEETYENIPGQSKITFLLQAIRNTTAAEEARQMAAVLLRRLLSSAFDEVYPALPSDVQTAIKSELLMIIQMETQSSMRKKVCDIAAELARNLIDEDGNNQWPEGLKFLFDSVSSQNVGLREAALHIFWNFPGIFGNQQQHYLDVIKRMLVQCMQDQEHPSIRTLSARATAAFILANEHNVALFKHFADLLPGFLQAVNDSCYQNDDSVLKSLVEIADTVPKYLRPHLEATLQLSLKLCGDTSLNNMQRQLALEVIVTLSETAAAMLRKHTNIVAQTIPQMLAMMVDLEEDEDWANADELEDDDFDSNAVAGESALDRMACGLGGKLVLPMIKEHIMQMLQNPDWKYRHAGLMALSAIGEGCHQQMEGILNEIVNFVLLFLQDPHPRVRYAACNAVGQMATDFAPGFQKKFHEKVIAALLQTMEDQGNQRVQAHAAAALINFTEDCPKSLLIPYLDNLVKHLHSIMVLKLQELIQKGTKLVLEQVVTSIASVADTAEEKFVPYYDLFMPSLKHIVENAVQKELRLLRGKTIECISLIGLAVGKEKFMQDASDVMQLLLKTQTDFNDMEDDDPQISYMISAWARMCKILGKEFQQYLPVVMGPLMKTASIKPEVALLDTQDMENMSDDDGWEFVNLGDQQSFGIKTAGLEEKSTACQMLVCYAKELKEGFVEYTEQVVKLMVPLLKFYFHDGVRVAAAESMPLLLECARVRGPEYLTQMWHFMCDALIKAIGTEPDSDVLSEIMHSFAKCIEVMGDGCLNNEHFEELGGILKAKLEEHFKNQELRQVKRQDEDYDEQVEESLQDEDDNDVYILTKVSDILHSIFSSYKEKVLPWFEQLLPLIVNLICPHRPWPDRQWGLCIFDDVIEHCSPASFKYAEYFLRPMLQYVCDNSPEVRQAAAYGLGVMAQYGGDNYRPFCTEALPLLVRVIQSADSKTKENVNATENCISAVGKIMKFKPDCVNVEEVLPHWLSWLPLHEDKEEAVQTFNYLCDLIESNHPIVLGPNNTNLPKIFSIIAEGEMHEAIKHEDPCAKRLANVVRQVQTSGGLWTECIAQLSPEQQAAIQELLNSA

SEQ ID NO: 776 - DNA, 7709 bp, Homo sapien
cgaaggacctgaaggaaagtggaaaagtccaaagtttaagatgccagagatgcattttaagactccaaagatatccatgccagatattgacctgaatctcacaggtccaaaaataaaaggagatgtggatgttacaggccctaaggtagagggagatctgaaaggtcctgaagttgacctcaaaggccccaaagtggacattgatgtcccagatgttaatgttcagggtccagactggcacctgaagatgcccaagatgaaaatgcctaagttcagtatgcctggcttcaaaggagagggcccagatggtggatgtgaagctgcccataggctgacattgatgtctcaggaccaaagtggacattgaaggccctgatgttaacattgaaggaccagagggaaagttgaaagggcctaagttcaagatgccagagatgaatatcaaagcccccaagatctccatgcctgatattgacttaaacctgaaaggacccaagtgaagggtgatgtggatgtttcccttcctaaagtggaaggtgacctcaagggcccagaagttgacatcaagggcccaaaagtggacattgacgcacctgatgttgatgttcatggcccagactggcacctaaagatgcccaagatgaaaatgcccaagttcagcatgcctggcttcaaagcagagggccctgaagctggaatgtgaacctgcccaaggctgacgttgatgtctcaggccccaaagtggatattaatgccccagatgtgggtgttcaaggcccagactggcacctgaagatgcccaaggtgaaaatgccaaagttcagcatgcctggcttcaaaggagagggcccagatggggatgtgaagctgcccaaggctgacattgatgtctcaggacccaaagtggacattgaaggccctgatgttaacattgaaggaccagagggaaagttgaaagggcctaagttcaagatgccagagatgaatatcaaagcccccaagatctccatgcctgatattgacttaaacctgaaaggacccaaagtgaagggtgatgtggatgtttcccttcctaaagtggaaggtgacctcaagggcccagaagttgacatcaagggcccaaaagtggacattgacgcacctgatgttgatgttcatggcccagactggcacctaaagatgcccaagataaaaatgcccaagatcagcatgcctggcttcaaaggagaaggtccagatgtggacgtgaacctgcccaaggctgacattgatgtctcaggaccgaaagtggatgttgaatgtcccgatgtgaatatcgaaggacctgaaggaaagtggaaaagtccaaagtttaagatgccagagatgcattttaagactccaaagatatccatgccagatattgacctgaatctcacaggtccaaaaataaaaggagatgtggatgttacaggccctaaggtagagggagatctgaaaggtcctgaagttgacctcaaaggccccaaagtggacattgatgtcccagatgttaatgttcagggtccagactggcacctgaagatgcccaagatgaaaatgcccaagttcagcatgcctggcttcaaagcagagggccctgaagtggatgtgaacctgcccaaggctgacgttgatgtctcaggccccaaagtggacgttgaaggccctgatgttaacattgaaggaccagagggaaagttgaaagggcccaagttcaagatgccagagatgaatatcaaagcccccaagatccccatgcctgactttgatttgcatctgaaaggtcccaaggtgaagggcgatgtggatatttctctgcccaaagtggaaggtgacctcaagggccctgaagttgacatcaggggtcccaaagtggacattgatgtcccggatgtgggcgttcaaggcccagactggcacctaaaaatgcccaaagtgaaaatgcccaaattcagcatgcctggcttcaaaggagagggcccagatgtggatgtgaacctgcccaaggctgaccttgatgtctcaggacccaaggtggacattgatgttccagatgtgaatatcgaaggcccagagggaaagttgaaaggtcccaaattcaaaatgcctgagatgaacatcaaagcccccaagatctccatgcctgacattgatcttaacctgaaaggtcccaaagtgaagggtgacatggatgtgtctctgccaaaagtggaaggtgacatgaaagttcctgacgtggatattaaaggccccaaagtggatattaatgccccagatgtggatgttcaaggcccagactggcacctgaagatgcctaaaataaaaatgcccaagatcagcatgcctggcttcaaaggagaaggtccagaagtggacgtgaacctgcccaaggctgaccttgacgtctcaggacccaaggtggacgttgatgttccagatgtgaatattgaaggtccagatgcgaaactgaagggccctaaattcaagatgccagagatgaacatcaaagcccccaagatctccatgcctgactttgatttgcatctgaaaggccctaaggtgaaaggagatgtggatgtttctctgcctaagatggaaggtgatctaaagggtcctgaagttgacatcaagggccccaaagtggacattaatgctccagatgtggatgttcaaggcccagactggcacctgaagatgcccaaggtgaaaatgcccaagttcagcatgcctggcttcaaaggagagggcccagatgtggatgtgaacctgcccaaggctgaccttgatgtctcaggacccaaggtggacattgatgttcctgatgtggatatccgaaggtccagaagggaaactgaaaggtcccaaattcaagatgcctgagatgagcatccaagcccccaagatctccatgcctgatattgacttaaacctgaaaggacccaaagtgaagggcgatgtggatgttacccttcctaaagtggaaggtgacctcaagggcccagaagctgacatcaagggcccaaaagtggacatcaacacccctgatgtggatgttcatggcccagactggcacctgaagatgcccaaggtgaaaatgcccaaattcagcatgcctggcttcaaaggagaaggtccagatgtggatgtgaacctgcccaaggctgacattgatgtctcaggacccaaagtggacgttgatgttcctgatgtgaatatcgaaggtccagatgcgaaactaaagggccccaagttcaagatgcctgagatgagcatcaaagcccccaagatctccatgcctgatattgacttaaacctgaaaggacccaaagtgaagggcgatgtggatgttacccttcctaaagtggaaggtgacctcaagggcccagaagctgacatcaagggcccaaaagtggacatcaacacccctgatgtggatgttcatggcccagactggcacctgaagatgcccaaggtgaaaatgcccaaattcagcatgcctggcttcaaaggagaaggtccagatgtggatgtgagcctgcccaaggccgacatcgatgtctcgggacccaaggtggacgttgatattccagatgtgaatatcgaaggtccagacgcaaaactgaagggccccaagttcaagatgcctgaaataaatatcaaagctcccaagatctccatacctgatgttgacctggatttgaaaggacccaaagtaaaaggagattttgatgtgtctgtccctaaggttgaagggactttgaaaggcccagaagtagatcttaaaggtccacgtctggatttcgaaggccctgatgccaaactcagtggcccatctttgaagatgccatcgctggagatatctgctcctaaagtaactgctcctgatgttgatttgcatctcaaggcaccaaaaattggattttcaggtccgaagttagaaggtggtgaagtggacctcaagggacccaaagttgaagctccaagcttagatgtacacatggacagcccagatattaacatcgaagggccagatgttaaaatccccaaatttaagaaacccaagtttggatttggggcaaaaagccccaaagctgacatcaagtcaccttcactggatgtcactgttcctgaggcagagctgaaccttgagactcctgaaattagtgttggtggcaagggcaagaaaagtaagtttaaaatgcctaaaattcatatgagtggtcctaagattaaggccaaaaaaacagggatttgacctgaatgttcctgggggtgaaattgatgccagcctcaaggctccggatgtagatgtcaacatcgcagggccggatgctgcactcaaagtcgacgtgaaatcgcccaaaaccaagaaaacgatgtttggaaaaatgtacttcccagatgtagagtttgacattaaatcacctaaatttaaagctgaggcccctctccctagccccaaactggagggtgaactccaggcacctgatctggaactttctttgccagcgattcacgtcgaaggtcttgacatcaaggcgaaggctcccaaggtcaagatgccagatgtggacatctcagtgccaaaaatagagggtgacctgaaaggccccaaagtgcaggcaaacttgggtgcacctgacatcaacatcgaaggcctagatgctaaagtcaaaacaccgtccttcggcatttctgcccctcaagtctccatccctgatgtgaatgtaaacttgaaaggaccaaagataaagggtgatgtccccagcgtgggactggaaggaccagatgtagatctgcaaggtccagaagcaaaaattaagttccccaagttttccatgcccaagatcggcatcccaggtgtgaaaatggagggtgggggagccgaggtccatgcccagctaccctctcttgaaggagacttgagaggaccagatgttaagctcgaagggcccgatgtttctctaaaggggccaggagtagacttgccttcagtgaacctctctatgccaaaagtctctgggcctgaccttgatctgaacttgaaaggaccaagtttgaagggagacctggatgcatctgttcccagcatgaaggtgcatgctccagggctcaacctcagtggtgtcggtggcaaaatgcaggtgggaggagacggtgtgaaagtgccagggatcgatgccacaacaaagcttaacgttggggcaccagatgtgacactgaggggaccaagcctgcagggagatctggctgtctctggtgacatcaaatgccctaaagtatccgtaggagctcctgatctaagcttggaggcatccgaaggcagcattaaacttcccaaaatgaagctgccccaatttggcatctctactccggggtccgacttgcacgtcaatgccaaggggccacaggtttctggcgaactgaaggggccaggtgtggatgtgaacctgaaagggcctcggatttcagcaccgaatgtggactttaacttggaaggaccaaaagtgaaagggagccttggggccactggtgagatcaaaggccccactgtcggaggaggtcttccaggcattggtgttcaaggcctagaaggaaacctccagatgcctggaattaagtcctctggatgtgatgtgaacctgccaggcgtgaatgtgaaactcccaactgggcagatttctgggcctgaaatcaaaggtggtctgaaaggttcagaagtaggtttccatggggctgctcctgatatcagtgtgaaggggcctgcctttaatatggcatctcctgagtcagattttggcatcaacttgaagggcccaaaaatcaaaggaggtgcggatgtttcagggggtgtcagtgccccagacatcagccttggtgaagggcatttgagtgttaaaggttccgggggtgagtggaagggaccccaagtctcctctgctctcaacttggacacatctaagtttgctgggggccttcatttctcaggaccaaaggtggaaggaggtgtgaaaggaggtcagattggactccaggctcctgggctgagtgtgtctgggcctcaaggtcacttggaaagtggatctggaaaagtaacattccctaaaatgaagatccccaaatttaccttctctggccgtgagctggttggcagagaaatgggggtggatgttcacttccctaaagcagaggccagcatccaagctggtgctggagacggcgagtgggaagagtctgaagtcaaactgaaaaagtccaagatcaaaatgcccaagtttaatttttccaaacctaaagggaaaggtggtgtcactggctcaccagaagcatcaatttctgggtccaaaggtgacctgaaaagttcaaaggccagcctgggctctctggaaggagaggcagaggccgaagcctcttcaccgaaaggcaaattctccttatttaaaagtaagaagccacggcaccgctcaaattcattcagtgatgaaagagagttctctggaccttccaccccgacggggacgctggagtttgaaggtggggaagtgtctctggaaggtgggaaagttaaagggaaacacgggaagctgaaattcggtacctttggtggattggggtcaaagagcaaaggtcattatgaggtgactgggagcgatgatgagacaggcaagttacaggggagtggggtgtccctggcctctaagaagtcccgactgtcctcctcttctagcaatgacagtgggaataaggttggcatccagcttcccgaggtggagctgtcagtttccacaaagaaagagtagcaggcctttgtatgtgtgtacatatatatatatataacaaaacatcagccttgggtggtgtgttcctatataaactccaaagggaaacacaccgactgcctcagcaatcatgcaaagaccttgcctggcccggtggcaagcgctgaaaaaccgaccgcctgtaggctcctggaactatacagataggtaaagagttccaagttcgtccagcccatgtgcaaagtcaacagtatttgccttaagatttcatatatatatatttttttgcattgactgctgagagctcctgtttactaagcaagcttttgtgtttattatcctcatttttactgaacattgttagttttggggtaatggaaacccactttttcattgtaatgactttgggggcttttgttagtaagggtgggtggggtgatgggttgcagacggaggtcaggtcttcctctttcctgagactggatctgttcaaacagcaaacgcccacagatggcccagaggtggtggtagtcagggtgtgtgggtgtttttagggttctttagtgttgtttctttcacccaggggtggtggtcccagccagtttggtgctgacggtgagaggaaattagaatctgtttgcaaattgtccaacccaccccctcaacatgaggggcttccattttctgtgttttgtaagggaactgtttccttcatgccgccatgttcctgatattagttctgatttctttttaacaaatgttatcatgattaagaaaatttccagcactttaatggccaattaactgagaatgtaagaaaattgatgctgtacaaggcaaataaagctgtttattaacctccgaaaaaaaatctatgtcgggtgcggagaaagaggtaatgaaatggca

SEQ ID NO: 777 - protein, 2007 aa, Homo sapien
MPKVKMPKFSMPGFKGEGPDGDVKLPKADIDVSGPKVDIEGPDVNIEGPEGKLKGPKFKMPEMNIKAPKISMPDIDLNLKGPKVKGDVDVSLPKVEGDLKGPEVDIKGPKVDIDAPDVDVHGPDWHLKMPKIKMPKISMPGFKGEGPDVDVNLPKADIDVSGPKVDVECPDVNIEGPEGKWKSPKFKMPEMHFKTPKISMPDIDLNLTGPKIKGDVDVTGPKVEGDLKGPEVDLKGPKVDIDVPDVNVQGPDWHLKMPKMKMPKFSMPGFKAEGPEVDVNLPKADVDVSGPKVDVEGPDVNIEGPEGKLKGPKFKMPEMNIKAPKIPMPDFDLHLKGPKVKGDVDISLPKVEGDLKGPEVDIRGPKVDIDVPDVGVQGPDWHLKMPKVKMPKFSMPGFKGEGPDVDVNLPKADLDVSGPKVDIDVPDVNIEGPEGKLKGPKFKMPEMNIKAPKISMPDIDLNLKGPKVKGDMDVSLPKVEGDMKVPDVDIKGPKVDINAPDVDVQGPDWHLKMPKIKMPKISMPGFKGEGPEVDVNLPKADLDVSGPKVDVDVPDVNIEGPDAKLKGPKFKMPEMNIKAPKISMPDFDLHLKGPKVKGDVDVSLPKMEGDLKGPEVDIKGPKVDINAPDVDVQGPDWHLKMPKVKMPKFSMPGFKGEGPDVDVNLPKADLDVSGPKVDIDVPDVDIRRSRRETERSQIQDAEMSIQAPKISMPDIDLNLKGPKVKGDVDVTLPKVEGDLKGPEADIKGPKVDINTPDVDVHGPDWHLKMPKVKMPKFSMPGFKGEGPDVDVNLPKADIDVSGPKVDVDVPDVNIEGPDAKLKGPKFKMPEMSIKAPKISMPDIDLNLKGPKVKGDVDVTLPKVEGDLKGPEADIKGPKVDINTPDVDVHGPDWHLKMPKVKMPKFSMPGFKGEGPDVDVSLPKADIDVSGPKVDVDIPDVNIEGPDAKLKGPKFKMPEINIKAPKISIPDVDLDLKGPKVKGDFDVSVPKVEGTLKGPEVDLKGPRLDFEGPDAKLSGPSLKMPSLEISAPKVTAPDVDLHLKAPKIGFSGPKLEGGEVDLKGPKVEAPSLDVHMDSPDINIEGPDVKIPKFKKPKFGFGAKSPKADIKSPSLDVTVPEAELNLETPEISVGGKGKKSKFKMPKIHMSGPKIKAKKTGIDLNVPGGEIDASLKAPDVDVNIAGPDAALKVDVKSPKTKKTMFGKMYFPDVEFDIKSPKFKAEAPLPSPKLEGELQAPDLELSLPAIHVEGLDIKAKAPKVKMPDVDISVPKIEGDLKGPKVQANLGAPDINIEGLDAKVKTPSFGISAPQVSIPDVNVNLKGPKIKGDVPSVGLEGPDVDLQGPEAKIKFPKFSMPKIGIPGVKMEGGGAEVHAQLPSLEGDLRGPDVKLEGPDVSLKGPGVDLPSVNLSMPKVSGPDLDLNLKGPSLKGDLDASVPSMKVHAPGLNLSGVGGKMQVGGDGVKVPGIDATTKLNVGAPDVTLRGPSLQGDLAVSGDIKCPKVSVGAPDLSLEASEGSIKLPKMKLPQFGISTPGSDLHVNAKGPQVSGELKGPGVDVNLKGPRISAPNVDFNLEGPKVKGSLGATGEIKGPTVGGGLPGIGVQGLEGNLQMPGIKSSGCDVNLPGVNVKLPTGQISGPEIKGGLKGSEVGFHGAAPDISVKGPAFNMASPESDFGINLKGPKIKGGADVSGGVSAPDISLGEGHLSVKGSGGEWKGPQVSSALNLDTSKFAGGLHFSGPKVEGGVKGGQIGLQAPGLSVSGPQGHLESGSGKVTFPKMKIPKFTFSGRELVGREMGVDVHFPKAEASIQAGAGDGEWEESEVKLKKSKIKMPKFNFSKPKGKGGVTGSPEASISGSKGDLKSSKASLGSLEGEAEAEASSPKGKFSLFKSKKPRHRSNSFSDEREFSGPSTPTGTLEFEGGEVSLEGGKVKGKHGKLKFGTFGGLGSKSKGHYEVTGSDDETGKLQGSGVSLASKKSRLSSSSSNDSGNKVGIQLPEVELSVSTKKE

SEQ ID NO: 778 - DNA, 2113 bp, Homo sapien
gtgcggttgggaacgcggagcggacggattcgattcaacggggttccggaccgcgctgcgctatggagcaggtcaatgagctgaaggagaaaggcaacaaggccctgagcgtgggtaacatcgatgatgccttacagtgctactccgaagctattaagctggatccccacaaccacgtgctgtacagcaaccgttctgctgcctatgccaagaaaggagactaccagaaggcttatgaggatggctgcaagactgtcgacctaaagcctgactggggcaagggctattcacgaaaagcagcagctctagagttcttaaaccgctttgaagaagccaagcgaacctatgaggagggcttaaaacacgaggcaaataaccctcaactgaaagagggtttacagaatatggaggccaggttggcagagagaaaattcatgaaccctttcaacatgcctaatctgtatcagaagttggagagtgatcccaggacaaggacactactcagtgatcctacctaccgggagctgatagagcagctacgaaacaagccttctgacctgggcacgaaactacaagatccccggatcatgaccactctcagcgtcctccttggggtcgatctgggcagtatggatgaggaggaagagattgcaacacctccaccaccaccccctcccaaaaaggagaccaagccagagccaatggaagaagatcttccagagaataagaagcaggcactgaaagaaaaagagctggggaacgatgcctacaagaagaaagactttgacacagccttgaagcattacgacaaagccaaggagctggaccccactaacatgacttacattaccaatcaagcagcggtatactttgaaaagggcgactacaataagtgccgggagctttgtgagaaggccattgaagtggggagagaaaaccgagaagactatcgacagattgccaaagcatatgctcgaattggcaactcctacttcaaagaagaaaagtacaaggatgccatccatttctataacaagtctctggcagagcaccgaaccccagatgtgctcaagaaatgccagcaggcagagaaaatcctgaaggagcaagagcggctggcctacataaaccccgacctggctttggaggagaagaacaaaggcaacgagtgttttcagaaaggggactatccccaggccatgaagcattatacagaagccatcaaaaggaacccgaaagatgccaaattatacagcaatcgagctgcctgctacaccaaactcctggagttccagctggcactcaaggactgtgaggaatgtatccagctggagccgaccttcatcaagggttatacacggaaagccgctgcgctggaagcgatgaaggactacaccaaagccatggatgtgtaccagaaggcgctagacctggactccagctgtaaggaggcggcagacggctaccagcgctgtatgatggcgcagtacaaccggcacgacagccccgaagatgtgaagcgacgagccatggccgaccctgaggtgcagcagatcatgagtgacccagccatgcgccttatcctggaacagatgcagaaggacccccaggcactcagcgaacacttaaagaatcctgtaatagcacagaagatccagaagctgatggatgtgggtctgattgcaattcggtgatgacttgttcatccccccttcccttcgccctcatgtggaaagaggagctgggaccgcggcgagcagcacggagcggaagggagagcaggggagagaaggcctcatctctctatatttatacataaccccggggaagacacagagactcgtacctgcgctgtttgtgccgccgctgcctctgggccctcccagcacacgcatggtctcttcaccgctgccctcgagttccatgtctctttcccctgcccctagttgctgtctcggctgctctcccatagttggttttttttttatttggggcagtgggcatgttatggggaggggagggggttcttccagcctcaggtcccagctgtctcacgttgtttattctgcgtccccttctccaataaaacaagccagttgggcgtggttataac

SEQ ID NO: 779 - protein, 543 aa, Homo sapien
MEQVNELKEKGNKALSVGNIDDALQCYSEAIKLDPHNHVLYSNRSAAYAKKGDYQKAYEDGCKTVDLKPDWGKGYSRKAAALEFLNRFEEAKRTYEEGLKHEANNPQLKEGLQNMEARLAERKFMNPFNMPNLYQKLESDPRTRTLLSDPTYRELIEQLRNKPSDLGTKLQDPRIMTTLSVLLGVDLGSMDEEEEIATPPPPPPPKKETKPEPMEEDLPENKKQALKEKELGNDAYKKKDFDTALKHYDKAKELDPTNMTYITNQAAVYFEKGDYNKCRELCEKAIEVGRENREDYRQIAKAYARIGNSYFKEEKYKDAIHFYNKSLAEHRTPDVLKKCQQAEKILKEQERLAYINPDLALEEKNKGNECFQKGDYPQAMKHYTEAIKRNPKDAKLYSNRAACYTKLLEFQLALKDCEECIQLEPTFIKGYTRKAAALEAMKDYTKAMDVYQKALDLDSSCKEAADGYQRCMMAQYNRHDSPEDVKRRAMADPEVQQIMSDPAMRLILEQMQKDPQALSEHLKNPVIAQKIQKLMDVGLIAIR

SEQ ID NO: 780 - DNA, 3289 bp, Homo sapien
  Unsure 2104-2124: Unknown base
gctagatgagactgaagagtcttctttactttaagtgattgatttcatttaggactccttgtgggttttttgtaaaaagccattaaccatttcccctgccctgatctccatatcagcctttatatatattcattgtctctcaacagccccaatttttttatttaacagatggggaacagaggctctgagcggttaacaaagctttctttctgtggaaacctagtaaatggcaaagctggaatatgaaactgcaaagcctatgtgcttaactagtaaacccaaccacctgggaccaccatatcttactgtgcagtttgttgctgtgtgaggggatcagaacatctaagaactgccattcacgttgaggacaacatagggatttatatattaatacatgctggtgtaatacaggccggtgttctgttaaaattagtatattaggacagtttgccataccataggggaaaagccactttattctaattcacccaaaggtactgtaagtgctgatggctctgggtctgtctttctgtcaagttgccaagtcacataagtaatgaatccgcagctggaggagctgctgctggaggacaggcatgttttcagacaggagcatggcctttagctcatgaccataagagggcgctacagcaaagagtactaaataccaatcaaagtgagctcagagtacaagagggtaacttgcttttctccaaagtaaaagagaagacatagtcctcaaacacttgccctgtgccctgtccctgaactctccatggaggaattttttctgttgtttagtgttagcagaatttaggaagggcttgtaataaggaaggttgagggttgggtggggtcacactgtgttgtgtgaggatcattttcatgttaatgaaatgtttagttctttaaggggaatgtggtagagcctttatctccccctgcccttttttttaaactgcacaggtcctggcacaatgtttattgtgtcataaataaccaagaaatgggtttctacaaaagatgcaaagactgtgcttctggaattccctaccacagcgaggtccctgtgagtttgaaagaagctgtctgcgaagtggcccttgattacaaaaagaagaaacacgtattcaagctaagactaaatgatggcaatgagtacctcttccaagccaaagacgatgaggaaatgaacacatggatcaaggaaaaattactgcagttgacggaaaagaggaaagaaatgatcggtccttacagccgctcgtcagactccagcaacctgggatgagaggttctctgccctggaaaggctgactacattggagttactggaagtgcgcagacagcaagaggaagaggagaggaagaggcggccgccttctcccgagccgagcacgaaggtttcagaggaagccgagtcccagcagcagtgggatacttcaaaaggagaacaagtttccccaaacggtttgccagctgaacagggatctccacggatggcagaaacggtggacacaagcgaaatggtcaacggcgctacagaacaaaggacgagctctaaagagtccagccccatcccctccccgacctctgatcgtaaagccaagactgccctcccagcccagagtgccgccaccttaccagccagaacccaggagacaccttcggcccagatggaaggcttcctcaatcggaaacacgagtgggaggcccacaataagaaagcctcaagcaggtcctggcacaatgtttattgtgtcataaataaccaagaaatgggtttctacaaagatgcaaagactgctgcttctggaattccctaccacagcgaggtccctgtgagtttgaaagaagctgtctgcgaagtggcccttgattacaaaaagaagaaacacgtattcaagctaagactaaatgatggcatgagtacctcttccaagccaaagacaaagagaaccggttcagcctttttggccaaaaagaaatgaactcctttccttcacctcctgcccttctcttaccctttcagtgaaattcccgcatgcaagctcagaacccacacagtactctctgtgcccaaagttccccaaagtggttgaannnnnnnnnnnnnnnnnnnnnagagcatttcggggggggtgggggaaacacacctaaacactttatctcccagttaccaaagtttgaggtgcagagggaaggccagattttttttttaatgaaattatatagattagatctcagtatttaaactgttcctcaattttgtgaggctgtgttggaaataacccgcctctagtgctgttggtatgcaaggcagcggtgcttaatcaatatttcctgtgctcaccagaggccaaatgtaccaatatcctgacaccattctctctccatttacttcttggtggttaccctgactcttgactcttagaagtgcccgagatggggctaacctttattaaacagatcgcatattatgatcttgctgcagccacagtgcagctccacattaactctacagaccaaaccatttgtatctggcatcacttactaacacacgacatgcggcttttctgcatcaactgctatgacggttaagaatgtcagtatacaagaaggaatagaaaactgatactgttttaaataatctgtaatttcaatttttttttttttgctgaaatacattatattgtacgtttgagataattctagtacaaagtataataaaactagatgtataataaaccctttaaatcattggtaagtgtacaagtggtggaactgaagcatttactggacaaagtaatgttactctaatggttacttgctcgtgcgttgcccacactgtgttataatttgcttcatttccttgctatttgatacatagtgtgcatttctctgtcactgtaactattgtaatgacaaattttcatcttactgcacaatcaaaatgacattgataggaatgaactccagaggctgggcctgaacagggaggtggtcgctcaggcctggtgctcagtcgtacgacctgtacctctcaacttttgccctatctgttaaatatatgctatgtcattaaatgcttttaaatctagcacggtgactagttgttgttcttcctctgctgcgtgtgcatgcccagtagggaaactgcaaagggagaaatgacaaacaagaaacattttacaaccagtctgggctcacttttgcattttttatgcatgtctggtgcacaagctttgaaaactacagcaaacagtaataaatgtgactgttttgtagt

SEQ ID NO: 781 - protein, 163 aa, Homo sapien
MAETVDTSEMVNGATEQRTSSKESSPIPSPTSDRKAKTALPAQSAATLPARTQETPSAQMEGFLNRKHEWEAHNKKASSRSWHNVYCVINNQEMGFYKDAKTAASGIPYHSEVPVSLKEAVCEVALDYKKKKHVFKLRLNDGMSTSSKPKTKRTGSAFLAKKK

SEQ ID NO: 782 - DNA, 4573 bp, Homo sapien
cgcgtgtctacgcggacgcaccggctaagctgcttctgccgccgccggccgcctgggaccttgcggtgaggctgcgcggggccgaggccgcctccgagcgccaggtttattcagtcaccatgaagctgctgctgctgcacccggccttccagagctgcctcctgctgaccctgcttggcttatggagaaccacccctgaggctcacgcttcatccctgggtgcaccagctatcagcgctgcctccttcctgcaggatctaatacatcggtatggcgagggtgacagcctcactctgcagcagctgaaggccctgctcaaccacctggatgtgggagtgggccggggtaatgtcacccagcacgtgcaaggacacaggaacctctccacgtgctttagttctggagacctcttcactgcccacaatttcagcgagcagtcgcggattgggagcagcgagctccaggagttctgccccaccatcctccagcagctggattcccgggcctgcacctcggagaaccaggaaaacgaggagaatgagcagacggaggaggggcggccaagcgctgttgaagtgtggggatacggtctcctctgtgtgaccgtcatctccctctgctccctcctgggggccagcgtggtgcccttcatgaagaagaccttttacaagaggctgctgctctacttcatagctctggcgattggaaccctctactccaacgccctcttccagctcatcccggaggcatttggtttcaaccctctggaagattattatgtctccaagtctgcagtggtgtttgggggcttttatcttttctttttcacagagaagatcttgaagattcttcttaagcagaaaaatgagcatcatcatggacacagccattatgcctctgagtcgcttccctccaagaaggaccaggaggagggggtgatggagaagctgcagaacggggacctggaccacatgattcctcagcactgcagcagtgagctggacggcaaggcgcccatggtggacgagaaggtcattgtgggctcgctctctgtgcaggacctgcaggcttcccagagtgcttgctactggctgaaaggtgtccgctactctgatatcggcactctggcctggatgatcactctgagcgacggcctccacaatttcatcgatggcctggccatcggtgcttccttcactgtgtcagttttccaaggcatcagcacctcggtggccatcctctgtgaggagttcccacatgagctaggagactttgtcatcctgctcaacgctgggatgagcatccaacaagctctcttcttcaacttcctttctgcctgctgctgctacctgggtctggcctttggcatcctggccggcagccacttctctgccaactggatttttgcgctagctggaggaatgttcttgtatatttctctggctgatatgttccctgagatgaatgaggtctgtcaagaggatgaaaggaagggcagcatcttgattccatttatcatccagaacctgggcctcctgactggattcaccatcatggtggtcctcaccatgtattcaggacagatccagattgggtagggctctgccaagagcctgtgggactggaagtcgggccctgggctgcccgatcgccagcccgaggacttaccatccacaatgcaccacggaagaggccgttctatgaaaaactgacacagactgtattcctgcattcaaatgtcagccgtttgtaaaatgctgtatcctaggaataagctgccctggtaaccagtctctagctagtgcctcttgccctctcctcacctccttttctctcagtgactctggaacctgaatgcagcttacaagacaagcctgacttttttctctgattaccttggcctcctcttggaaccagtgctgaaaggttttgaatcctttacccaacaatgcaaaaatagagccaatggttataacttggctagaaatatcaagagttgaatccatagtgtggggcccatgactctagctgggcaccttggacctccagctggccaatagaagagacaggagacaggaagccttcccattttttcaaagtctgtttaattgcctattacttctctcaaagagaacctgaagtcagaacacatgagcagggtgagaggtgaggcaaggttcatcctgaatgggagaggaagtcgaaccactgctgtgtgtcttgtcaggatgctcacttgttcctactgagatgctggatattgattttgtaacagcacctggtgtttcacggctgtccgagtgagctaacgtggcggtgtggctgcctggacctcctctttcaggttaacgctgacagaatggaggctcaggctgtctgcaagaaaacagttggtttggctgtgattttgacctcctcttccccactgccatcttctaagagactttgtagctgcctcctagaagcacattctgagcacatttgagacctctgtgttagaggggagactgcacaaactatcctcccccaggttgagacgtctgcagagtggcaagctgacttgtagaaatggggtgccatttatgctctacttagacaagggtaatcagaaatggaatcagtgcaggcaaaatttaggatttgccgcttccataaatcaaagcatgactaatagggggtctctgaaatgtaagggcacaaacttcacttagggcatcgcagatgtttgcagaatggttggcctaatgattatgctacagatgggttttaaatgacccgtctaggttactgcttccttgcaaaaaaagtcgaatcctgcattgaattgaatatgaatttctctaactctctccagaaaatggatggagataacttgtctttaaaactgtaggccagccttagccactgtggagcccttgcctccgagctctggcttcaaggggagctcttctccaggttcactaggtgaattgatttattattatcatattgataatgtgagattctttagccactttggggagcctgtctctccagaagcctttcttagtggtgcccacagttggagcccaggggccatgtttgcaaactgattcatgtgcatggctgacaggagtactggttcactaccaatgcctgagcttttctcttacatagaaaaactgtccactctcagtaatcacaagcagcatccgttttgttttctcttcttgggagacatctgtcaaaccaggaatattcttgaaaagaacgtgagcaggaaaaactgctggtgatactttttttaagttttgtttttatcttgcctgttggcttcaatacatttgagaatacgctgaagagggaaaatttcagtgatggagattctagattaaatatcaggactgatttcctggtgggattatggtccagttttaccaaagaaccaattccttgaatgttggaatctaactttttatattgtcattattattgttgtttttaaacggttctttgtcttttctgttttatttttctcaagctgctttcaggagctagcagaaaataactcaaagttgaagactctggaagattttgctttaacctaactcgcattgatgtattaaatttataattttagcattcccaatagatcctatcattccttaaacataataccctttgtcttggagtagaatactaagttagagttagtggatttctagtttaggagaggagctcaaaactataatctttaacaaattgaaaaatgaaatagggtgttttccctttttgtgcacacctatattaccttaagaaatttccttccatagacagctgcctcaaagggaaatcctctttaaaccgtagttggcgcagaggtcagtcctagtcggagcttaggaggggcggagacgctcacatcgtctgacttgagtcgccactgattgtggcaacagctttgcctcatgagtcaaaaattggcaatttcttttgatttttagttgttgaatttgctgtttcaagcatttgtacatattagaagtctaaggagtagcaagtcagtgggaggactttttcacccctggcattagcagcttcgacctcattttccagatgcaccagctcctattaataagttagcaaggaaagtgtatgtcacgtgcaggaacagtgaggcagggacaggggttctgctccttctcacttcaccaccggcacacagcttgcccctgtctttgcccccaaaggtattttgtgtctagtgtcaaattggagctattcttcactggtccttaaccttgggttttaaaaagaaggcttctctgtttgggtagcgtaagagctgagtatagtaagtcctcttccaaagagatggcaatatgctgggcatctactttaaaacaaagttgtctgatttttgcaagagaggttaggattttattgttcttatttccctttacagttctgcagttccatcacagtatttttttaaataactcaggtgtatgagcagaaattagaaaagaaaattaacttatgtggactgtaaatgttttatttgtaagattctataaataaagctatattctgt

SEQ ID NO: 783 - protein, 531 aa, Homo sapien
RVYADAPAKLLLPPPAAWDLAVRLRGAEAASERQVYSVTMKLLLLHPAFQSCLLLTLLGLWRTTPEAHASSLGAPAISAASFLQDLIHRYGEGDSLTLQQLKALLNHLDVGVGRGNVTQHVQGHRNLSTCFSSGDLFTAHNFSEQSRIGSSELQEFCPTILQQLDSRACTSENQENEENEQTEEGRPSAVEVWGYGLLCVTVISLCSLLGASVVPFMKKTFYKRLLLYFIALAIGTLYSNALFQLIPEAFGFNPLEDYYVSKSAVVFGGFYLFFFTEKILKILLKQKNEHHHGHSHYASESLPSKKDQEEGVMEKLQNGDLDHMIPQHCSSELDGKAPMVDEKVIVGSLSVQDLQASQSACYWLKGVRYSDIGTLAWMITLSDGLHNFIDGLAIGASFTVSVFQGISTSVAILCEEFPHELGDFVILLNAGMSIQQALFFNFLSACCCYLGLAFGILAGSHFSANWIFALAGGMFLYISLADMFPEMNEVCQEDERKGSILIPFIIQNLGLLTGFTIMVVLTMYSGQIQIG

SEQ ID NO: 784 - DNA, 3273 bp, Homo sapien
gaattcggcacgagcgagtcgcgacgtcgtcggcaagcggccgccttccacgtaacgcgcgccggcgggggagggcgttggcgcggagccgacgggaacgtccgcgctgcggagcagggcagggaagccgggaggcgggcccggcccgagcttgtccttgtcgcgcaggtactccgagcactatgtcgtccccggcgtcgaccccgagccgccgcggcagccggcgtggaagggccacccccgcccagacgcctcggagtgaggatgccaggtcatctccctctcagagacgtagaggcgaggattccacctccacgggggagttgcagccgatgccaacctcgcctggagtggacctgcagagcactgctgcgcaggacgtgctgttttccagccctccccaaatgcattcttcagctatccctcttgactttgatgttagttcaccactgacatacggcactcccagctctcgggtagagggaaccccaagaagtggtgttaggggcacacctgtgagacagaggcctgacctgggctctgcacagaagggcctgcaagtggatctgcagtctgacggggcagcagcagaagatatagtggcaagtgagcagtctctaggccaaaaacttgtgatctggggaacagatgtaaatgtggcagcatgcaaagaaaactttcagagatttcttcagcgttttattgaccctctggctaaagaagaagaaaatgttggcatagatattactgaacctctatacatgcaacgacttggggagattaatgttattggtgagcaatttttaaatgtgaactgtgaacacatcaaatcatttgacaaaaatttgtacagacaactcatctcttacccacaggaagttattccaacttttgacatggctgtcaatgaaatcttctttgaccgttaccctgactcaatcttagaacatcagattcaagtaagaccattcaacgcattgaagactaagaatatgagaaacctgaatccagaagacattgaccagctcatcaccatcagcggcatggtgatcaggacatcccagctgattcccgagatgcaggaggccttcttccagtgccaagtgtgtgcccacacgacccgggtggagatggaccgcggccgcattgcagagcccagtgtgtgcgggcgctgccacaccacccacagcatggcactcatccacaaccgctccctcttctctgacaagcagatgatcaagcttcaggagtctccggaagacatgcctgcagggcagacaccacacacagttatcctgtttgctcacaatgatctcgttgacaaggtccagcctggggacagagtgaatgttacaggcatctatcgagctgtgcctattcgagtcaatccaagagtgagtaatgtgaagtctgtctacaaaacccacattgatgtcattcattatcggaaaacggatgcaaaacgtctgcatggccttgatgaagaagcagaacagaaacttttttcagagaaacgtgtggaattgcttaaggaactttccaggaaaccagacatttatgagaggcttgcttcagccttggctccaagcatttatgaacatgaagatataaagaagggaattttgcttcagctctttggcgggacaaggaaggattttagtcacactggaaggggcaaatttcgggctgagatcaacatcttgctgtgtggcgaccctggtaccagcaagtcccagctgctgcagtacgtgtacaacctcgtccccaggggccagtacacgtctgggaagggctccagtgcagttggcctcactgcgtacgtaatgaaagaccctgagacaaggcagctggtcctgcagacaggtgctcttgtcctgagtgacaacggcatctgctgtatcgatgagttcgacaagatgaatgaaagtacaagatcggtattgcatgaagtcatggaacagcagactctgtccattgcaaaggctgggatcatctgtcagctcaatgcgcgcacctctgtcctggcagcagcaaatcccattgagtctcagtggaatcctaaaaaaacaaccattgaaaacatccagctgcctcatactttattatcaaggtttgatttgatcttcctcatgctggaccctcaggacgaagcctatgacaggcgtctggctcaccacctggtcgcactgtactaccagagcgaggagcaggcagaggaggagctcctggacatggcggtgctaaaggactacattgcctacgcgcacagcaccatcatgccgcggctaagtgaggaagccagccaggctctcatcgaggcttatgtagacatgaggaagattggcagtagccggggaatggtttctgcataccctcgacagctagagtcattaatccgcttagcagaagcccatgctaaagtaagattgtctaacaaagttgaagccattgatgtggaagaggccaaacgcctccatcgggaagctctgaagcagtctgcaactgatccccggactggcatcgtggacatatctattcttactacggggatgagtgccacctctcgtaaacggaaagaagaattagctgaagcattgaaaaagcttattttatctaagggcaaaacaccagctctaaaataccagcaactttttgaagatattcggggacaatctgacatagcaattactaaagatatgtttgaagaagcactgcgtgccctggcagatgatgatttcctgacagtgactgggaagaccgtgcgcttgctctgaagccttgtgagcaaggaaggctccctgcatgtcatgcaattctgcacgccacatgggtgtggtcatgcaatcatcagttggccgccatcagtgtaaatagagcttaaagtcatggtttggctgcataaaaaattttctaacttgggttcaatatttgtagtgaagtatctgttttcatttttttcacgttataaataaaaatactatgctggccgggcgcggtggctcacacctgtaatcccagcactttgggaggccaatgtgggtggatcatgaggtcaggagttcaagaccagcctagccaagatggtgaaaccccgtctctagtaaagataacaaaaaattagctgggcttgatggcatgcgcctgtaatcccagctactcgggaggttgaggcaggagatcgcttaaacccaggcggcagaggttgcagtgagccaagatcgcgccactgcactccagcctcagcaatagagtgagactgtctcaaaaaaaaaa

SEQ ID NO: 785 - protein, 923 aa, Homo sapien
IRHERVATSSASGRLPRNARRRGRALARSRRERPRCGAGQGSREAGPARACPCRAGTPSTMSSPASTPSRRGSRRGRATPAQTPRSEDARSSPSQRRRGEDSTSTGELQPMPTSPGVDLQSTAAQDVLFSSPPQMHSSAIPLDFDVSSPLTYGTPSSRVEGTPRSGVRGTPVRQRPDLGSAQKGLQVDLQSDGAAAEDIVASEQSLGQKLVIWGTDVNVAACKENFQRFLQRFIDPLAKEEENVGIDITEPLYMQRLGEINVIGEQFLNVNCEHIKSFDKNLYRQLISYPQEVIPTFDMAVNEIFFDRYPDSILEHQIQVRPFNALKTKNMRNLNPEDIDQLITISGMVIRTSQLIPEMQEAFFQCQVCAHTTRVEMDRGRIAEPSVCGRCHTTHSMALIHNRSLFSDKQMIKLQESPEDMPAGQTPHTVILFAHNDLVDKVQPGDRVNVTGIYRAVPIRVNPRVSNVKSVYKTHIDVIHYRKTDAKRLHGLDEEAEQKLFSEKRVELLKELSRKPDIYERLASALAPSIYEHEDIKKGILLQLFGGTRKDFSHTGRGKFRAEINILLCGDPGTSKSQLLQYVYNLVPRGQYTSGKGSSAVGLTAYVMKDPETRQLVLQTGALVLSDNGICCIDEFDKMNESTRSVLHEVMEQQTLSIAKAGIICQLNARTSVLAAANPIESQWNPKKTTIENIQLPHTLLSRFDLIFLMLDPQDEAYDRRLAHHLVALYYQSEEQAEEELLDMAVLKDYIAYAHSTIMPRLSEEASQALIEAYVDMRKIGSSRGMVSAYPRQLESLIRLAEAHAKVRLSNKVEAIDVEEAKRLHREALKQSATDPRTGIVDISILTTGMSATSRKRKEELAEALKKLILSKGKTPALKYQQLFEDIRGQSDIAITKDMFEEALRALADDDFLTVTGKTVRLL

SEQ ID NO: 786 - DNA, 3273 bp, Homo sapien; identical to SEQ ID NO: 784

SEQ ID NO: 787 - DNA, 3767 bp, Homo sapien
gctaagaggagtccctgtgtgggcagctggagccttcagattctcttcaggggaagagtccacatcccacctcatcatgtcccgaagaagccagcgcctcacgcgctactcccagggtgacgatgacggcagcagcagcagcggagggagctcggtggctgggagtcagagcaccctgtttaaagacagtcctctcaggaccttgaagaggaaatccagcaacatgaagcgcctgtccccagcgccacagctgggcccgtcctctgatgcacacacctcctactacagtgagtcgctggtccacgagtcctggttcccacccaggagctccctggaggaactgcatggtgacgccaactggggtgaggacctgcgggtgcggaggaggagaggcacgggtggctcagagagcagcagggccagcgggcttgtggggcgcaaggccaccgaggacttcctgggctcttcctcgggctactcctctgaggacgactacgtgggctactcggatgtggaccagcagagttccagctcgcggctccgaagcgccgtctcacgggcgggctccttactctggatggtggccacttcgccaggccggctcttcagacttctctactggtgggctggcaccacctggtaccgcctgaccacagctgcctccctccttgacgtcttcgttttaaccaggcgcttctcgtccctgaagacgttcctctggttcctgctgccgctgctcttgctgacgtgcctgacgtatggtgcttggtatttctacccctatgggctgcagacattccaccctgctttggtttcctggtgggcagcgaaggacagcaggaggccggatgagggctgggaagccagagactcatcgccacatttccaggctgagcagcgtgttatgtcccgggtacactctctggagcggcgtctggaagctcttgctgctgaattttcctccaactggcagaaggaggccatgcggctggaacgtctggagctgcggcaaggggctcctggccagggaggtggtggtggcctgagccacgaggacaccctggcgctgctggaggggctagtgagccgccgtgaagctgccctgaaggaggatttccgcagggaaactgctgctcgcatccaggaagaactgtctgccctgagagcagagcatcagcaagactcagaagacctcttcaagaagatcgtccgggcctcccaggagtccgaggctcgcatccagcagctgaagtcagagtggcaaagcatgacccaggagtccttccaggagagctctgtgaaggagctgaggcggctggaggaccagctggccggcctgcagcaggagctggcggctctggcactgaagcagagctcggtggcggaagaagtgggcctgctgccccagcagatccaggccgtgcgggacgacgtggaatctcagttcccggcctggatcagtcagttccttgcccgaggtggagggggccgcgtggggctccttcagagagaggagatgcaagctcagctgcgagagctggagagcaagatcctcacccatgtggcagagatgcagggcaagtcggccagggaagccgcggcctccctgagcctgacgctgcagaaagaaggtgtgattggagtgacagaggagcaggtgcaccacatcgtgaagcaggccctgcagcgctacagtgaggaccgcatcgggctggcagactacgccctggagtcaggaggggccagcgtcatcagcacccgatgttctgagacctacgagaccaagacggccctcctcagcctcttcggcatccccctgtggtaccactcccagtcaccccgagtcatcctccagccagatgtgcacccaggcaactgctgggccttccaggggccacagggcttcgccgtggtccgcctctctgcccgcatccgccccacagccgttaccttagagcatgtgcccaaggccttgtcacccaacagcactatctccagtgcccccaaggacttcgccatctttgggtttgacgaagacctgcagcaggaggggacactccttggcaagttcacttacgatcaggacggcgagcctattcagacgtttcactttcaggcccctacgatggccacgtaccaggtggtggagctgcggatcctgactaactggggccaccccgagtacacctgcatctaccgcttcagagtgcatggggagcccgcccactagccctgcttactggtgcctgctgccagccatctgggagtgggtgaacagcaccccgccgcttcccccacacgcttgctcggcgctctgacttctaggagcacaagagaggagcctgtggccccatgcagatgaaaaggacgggcagggtctcctgagcagcaggtggctcgaggcggttagcaggctccagcagctcccttcttccttccctctgtgcccgtggcgtctgcttcccatcctgggagtgtgtatatatgtagcatatcatgggggactgggaagttgggagaggtaggacctgactggtcttggctggggtcaggggctggtgcctgggagctgatgaagcaggtgccagggctgtgggaggggcaagctacggcctgggctaggtgagctgcctctgcccctgggcaaggaagcgaggccctctgggaggagggtgcttagctccagagcaggatgggacttccccaggcaggaagcacttgatggagagctgcccagctctcctacaaggttagtgccctccacctagggaagcctgaaccacagggtccctgagggccttcgacaaaagtgtgtatttgtcccggggagggtagcagtgggccatggggcttcttgtgccctaaaggggactggctgctgtgatcttctaaggggcccagggccaaccctgtaggcttcccctctgctggggacggtagttgcttttctctctcctgatgctaggttggggcccaccctgctccctgttcctgctagggcctgccagtgcccctgagcttgctttccacattctcccagggtatggagacctagacctgtctttggggccattagcatctggggttatagcaagaagagtggggagcatggaactcctgggctcttgtggggacgttcagggtatcggggtgcgaggtctgtctgcaccggcccccacatctaaccaggccctgatgtaggggtcgtccgctcaggctgcccccttgggctcttgcagctcttgttcaggtagtcgcccttctggtttgttctctgtggggcagttggtgggggctgggggaagaggctggcagaagttaccctggatagggaagggggaggaggggacttttagagccagcaggccccactgtattatgtatatatttttcaaggtctgtttttctaactgaaaagctaagggcttgattcctagccccgttctgtggggcactgggtgatactcagtttcttgttcctggccgtggagaggggcctggggcactggttccggctgtgtctggtggtccggctgcagggaaggggcaagaaggcgggcaggccttcactgcagcactgagcctcaaatccgctctggagcatgaggctggatgcagtggtggtgaggccgccccgctccatcccgaggcagccaggctttgttttgcgctctcctgtcacaaatgctgcactattggttcttaagttttttatctccagatcctaatttatgcctatgcaaaaaataaatgacgcccaagagctg

SEQ ID NO: 788 - DNA, 1514 bp, Mus musculus
agttctcactgagacctgtcaccccgactcaacgtgagacgcaccgcccggactcaccatgcgtgaatgcatctcagtccacgtggggcaggcaggtgtccagatgggcaatgcctgctgggagctctattgcttggaacatgggattcagcctgatgggcagatgcccagtgacaagaccattggtggaggggacgactccttcaccaccttcttctgtgaaactggtgctggaaaacacgtaccccgggcagtttttgtggatctggagcctacggtcattgatgagatccgaaatggcccataccgacagctcttccacccagagcagctcatcactgggaaagaggatgctgccaacaactatgcccgtggtcactataccattggcaaggagatcattgacccagtgctggatcggatccgcaagctgtctgaccagtgcacaggacttcagggcttcctggtgttccacagctttggtgggggcactggctctggcttcacctcactcctgatggagcggctctctgttgactatggcaagaaatccaagctggaattctccatctacccagccccccaggtgtctacagccgtggtcgagccctacaactctatcctgaccacccacaccaccctggagcactcagactgtgccttcatggtggacaacgaagcaatctatgacatctgccgccgcaacctagacatcgagcgcccaacctacaccaacctcaatcgcctcattagccaaattgtctcctccatcacagcttctctgcgctttgacggggccctcaatgtggacctgacagagttccagaccaacctggtgccctaccctcgcatccacttccccctggccacctatgcaccagtcatctctgcagaaaaggcataccacgagcagctgtcggtggcagagatcaccaatgcctgctttgagcctgccaaccagatggtaaagtgtgatccccggcacggcaagtacatggcctgctgcctgctgtaccgtggagatgtggtgcccaaggatgtcaacgctgccattgccgccatcaagaccaagcgcagcattcagtttgtggactggtgccccacaggcttcaaggttggtatcaactaccagcctcccactgtggtgcctgggggtgacctggccaaggtgcagcgtgccgtgtgcatgctgagcaacacgaccgccatcgccgaggcctgggcccgcctggaccacaagttcgacctgatgtatgccaagagggcgtttgtgcactggtatgtgggtgagggcatggaggagggtgagttctccgaggcccgtgaggatatggctgccctggagaaggattatgaggaggtgggcatcgactcctatgaggacgaggatgagggagaagaataaagcagctgcctggagcctattcactatgtttattgcaaaatcctttcgaaataaacagtttccttgcacggttaaaaaaaaaaaaaaaaaaaaaaaaaaaaaaaaaaaa

SEQ ID NO: 789 - protein, 448 aa, Mus musculus
MRECISVHVGQAGVQMGNACWELYCLEHGIQPDGQMPSDKTIGGGDDSFTTFFCETGAGKHVPRAVFVDLEPTVIDEIRNGPYRQLFHPEQLITGKEDAANNYARGHYTIGKEIIDPVLDRIRKLSDQCTGLQGFLVFHSFGGGTGSGFTSLLMERLSVDYGKKSKLEFSIYPAPQVSTAVVEPYNSILTTHTTLEHSDCAFMVDNEAIYDICRRNLDIERPTYTNLNRLISQIVSSITASLRFDGALNVDLTEFQTNLVPYPRIHFPLATYAPVISAEKAYHEQLSVAEITNACFEPANQMVKCDPRHGKYMACCLLYRGDVVPKDVNAAIAAIKTKRSIQFVDWCPTGFKVGINYQPPTVVPGGDLAKVQRAVCMLSNTTAIAEAWARLDHKFDLMYAKRAFVHWYVGEGMEEGEFSEAREDMAALEKDYEEVGIDSYEDEDEGEE

SEQ ID NO: 790 - DNA, 3213 bp, Homo sapien
gaccgaagcaagagctggttcaggtggcagccacagcagcctcagggacctcagcaactatggcctcctgcccagactctgataatagctgggtgcttgctggctccgagagcctgccagtggagacactgggcccggcatccaggatggacccagaatctgagagagccctgcaggcccctcacagcccctccaagacagatgggaaagaattagctgggaccatggatggagaagggacgctcttccagactgaaagccctcagtctggcagcattctaacagaggagactgaggtcaagggcaccctggaaggtgatgtttgtggtgtggagcctcctggcccaggagacacagtagtccagggagacctgcaggagaccaccgtggtgacaggcctgggaccagacacacaggacctggaaggccagagccctccacagagcctgccttcaacccccaaagcagcttggatcagggaggagggccgctgctccagcagtgacgatgacaccgacgtggacatggagggtctgcggagacggcggggccgggaggccggcccacctcagcccatggtgcccctggctgtggagaaccaggctgggggtgagggtgcaggcggggagctgggcatctccctcaacatgtgcctccttggggccctggttctgcttggcctgggggtcctcctcttctcaggtggcctctcagagtctgagactgggcccatggaggaagtggagcggcaggtcctcccagaccccgaggtgctggaagctgtgggggacaggcaggatgggctaagggaacagctgcaggccccagtgcctcctgacagtgtccccagcctgcaaaacatgggtcttctgctggacaagctggccaaggagaaccaggacatccggctgctgcaggcccagctgcaggcccaaaaggaagagcttcagagcctgatgcaccagcccaaagggctagaggaggagaatgcccagctccggggggctctgcagcagggcgaagccttccagcgggctctggagtcagagctgcagcagctgcgggcccggctccaggggctggaggccgactgtgtccggggcccagatggggtgtgcctcagtgggggtagaggcccacagggtgacaaggccatcagggagcaaggccccagggagcaggagccagaactcagcttcctgaagcagaaggaacagctggaggctgaggcacaggcattaaggcaagagttagagaggcagcgacggctgctggggtctgtacagcaggatctggagaggagcttgcaggatgccagccgcggggacccagctcatgctggcttggctgagctgggccacagattggcccagaaactgcagggcctggagaactggggccaggaccctggggtctctgccaatgcctcaaaggcctggcaccagaagtcccacttccagaattctagggagtggagtggaaaggaaaagtggtgggatgggcagagagaccggaaggctgagcactggaaacataagaaggaagaatctggccgggaaaggaagaagaactggggaggtcaggaggacagggagccagcaggaaggtggaaggagggcaggccaagggtggaggagtcggggagcaagaaggagggcaagcgacagggcccgaaggaacccccaaggaaaagtggtagcttccactcctctggagaaaagcagaagcaacctcggtggagggaagggactaaggacagccatgaccccctgccatcctgggcagagctgttgaggcccaagtaccgggcaccccagggctgctcaggtgtggacgagtgtgcccggcaggagggcctgactttctttggcacagagctagccccagtgcggcaacaggagctggcctctctgctaagaacatacttggcacggctgccctgggctgggcagctgaccaaggagctacccctctcacctgctttctttggtgaggatggcatcttccgtcatgaccgcctccgcttccgggattttgtggatgccctggaggacagcttggaggaggtggctgtgcaacagacaggtgatgatgatgaagtagatgactttgaggacttcatcttcagccacttctttggagacaaagcactgaagaagaggtcagggaagaaggacaagcactcacagagcccaagagctgcggggcccagggaggggcacagccatagccaccaccaccaccaccggggctgacaccctgccccacagggaatggccttggcctggcccagcccaagatcccagcgttatctaactcctggagggtggactctgtcctggcttgtttggtgtcctcagatatctttcacacagtagagcaaaatcaccagccctgcactgatgtcactttatgtagaaaaaggccttagctggacctgcgttgccgtctatgcaaatgcatgcaaatactccaggccctgggatgtgggcttgtgttttgtcactgtgaagggggagatgggagaggagcctgttttggggtggggtctggggaaggcaatctgattctgaagctaaagagctttcatcctcttgagtgtatgtccccatagtgggccccttgacccacatgctgaccggtgccttgggatttgactagagttgctggctcgaggcccagcacgaggacttaccctggggttttgttaggtttggaagcagctgtccctagggggtgaagtcccccccctttttttttttacccctgcttctcccacggcttcacctccctatgtgaactgtagactcagatcccaataaagtgctgttgcagctatgatgctaggtggtttctaagcacaggggacaccccacaccccctgcctgaatggatgggtccatcccaggcactggtacttgcccccttgttctgtatccccctttgcccttgccttgcccttccaacaaaccctaggcccttgagaagctgatacttctccttttgctcacagctgccttggccccacccctgggagatgtagcaaattgagtgtgggttttggagtctgagcctcaggctcaaatccaggccaagtgatcttgggcaagttaatctctgggaactttgggtttcttatcctcaaaaaaggcgatggaagggctggggaagtgattaaataaaagcaacgcaagaaaaaaaaaaaaaaaaaaa

SEQ ID NO: 791 - protein, 731 aa, Homo sapien
MASCPDSDNSWVLAGSESLPVETLGPASRMDPESERALQAPHSPSKTDGKELAGTMDGEGTLFQTESPQSGSILTEETEVKGTLEGDVCGVEPPGPGDTVVQGDLQETTVVTGLGPDTQDLEGQSPPQSLPSTPKAAWIREEGRCSSSDDDTDVDMEGLRRRRGREAGPPQPMVPLAVENQAGGEGAGGELGISLNMCLLGALVLLGLGVLLFSGGLSESETGPMEEVERQVLPDPEVLEAVGDRQDGLREQLQAPVPPDSVPSLQNMGLLLDKLAKENQDIRLLQAQLQAQKEELQSLMHQPKGLEEENAQLRGALQQGEAFQRALESELQQLRARLQGLEADCVRGPDGVCLSGGRGPQGDKAIREQGPREQEPELSFLKQKEQLEAEAQALRQELERQRRLLGSVQQDLERSLQDASRGDPAHAGLAELGHRLAQKLQGLENWGQDPGVSANASKAWHQKSHFQNSREWSGKEKWWDGQRDRKAEHWKHKKEESGRERKKNWGGQEDREPAGRWKEGRPRVEESGSKKEGKRQGPKEPPRKSGSFHSSGEKQKQPRWREGTKDSHDPLPSWAELLRPKYRAPQGCSGVDECARQEGLTFFGTELAPVRQQELASLLRTYLARLPWAGQLTKELPLSPAFFGEDGIFRHDRLRFRDFVDALEDSLEEVAVQQTGDDDEVDDFEDFIFSHFFGDKALKKRSGKKDKHSQSPRAAGPREGHSHSHHHHHRG

SEQ ID NO: 792 - DNA, 2002 bp, Homo sapien
ctcttctcacatcagcgggtccaggcccaaccgacagactatgggggctccttcaccaggcgctgcgtggagtggctgctgggcctctacttcctcagccacatccccatcaccctgttcatggacctgcaggcggtcgtgccgcgcgagctctacccagtcgagtttagaaacctgctgaagtggtatgctaaggagttcaaagacccactgctacaggagcccccagcctggtttaagtcctttctgttttgcgagcttgtgtttcagctgcctttctttcccattgcaacgtatgccttcctcaaaggaagctgcaagtggattcgaactcctgcaatcatctactctgttcacaccatgacaaccttaattctgatactctccacatttctgtttgaggatttctccaaagccagtggtttcaagggacaaagacctgagactttgcatgaacggttaacccttgtgtctgtctatgccccctacttactcatcccattcatacttttaattttcatgttgcggagcccctactacaagtatgaagagaaaagaaaaaaaaaatgaaggaaacaaccactggcccagggtagagatgcctacagggtggttgcttgttggatacatacaggaacactgctcagaacccacgtcttcagcagcatttgaaacactggcagcaatgcacaagagcaagatggtgtcaggaaccatgtcaaaccctcaccttcttccattttttttttttttttgagacagtctcactctgttgccaggctggagtaaagggcagtggcatgatctcggctcactgcaacctccgcctcctgggctcaagccatcttccttagcctcccaagtagctagaactacaggtgtgtaccaacacgtatggctaatttgttttgttttttttgtgtgtgtggagacagggttttgccatgttgcccaggttggtctcgaacgcctaggctcaagtgatctgcccacctcagtctccctaagtgctgggattacagacgtgaaccactgggcccagcccaaaccttcaccttctaagggcactgggatgaacagaccgatcggcttgagggtgggcaaaggggtgtgggctaggttataaggaagtggtaccaaataactgtgttgcctgagttccaccgcaagattactaaaagcaggaccagaccagaaactgctaaagaacatggcctgtttgacatgttcatgagtcacctgacccacagcatatatgcttatgactaaaccctccactcctgattctcaagagtgtatcacctgtcagcaaaatgaatagtgggatattttgggccattttaaatgtgaaattttgcctctttaatgttaattcaaaactatatcaatgttttcttgttcccacctctaacccaaggaaaaaagagaaaacatactatgcaaaggaagtttaaacttaagttttccttaagggtcagcccaacaatgactttcagtcaaatggattaaactggaaaatgtttttgtttctgttgtaaacagatcatcctaggcgaaagttttttttgtttgtttgcttttaaattagtttatttctaaatcttagtcttccacatttctagaggccacctgacacaagtccctgtatctgaagtctagcatctcaaggctgatctggaagtgtgctagtatgctccctagtggataacttaatcttttaatacagttccgtcattcccatcttgttttcagaagagaaggtggctacagccaggcataacttatccactgtgtgcatagagggtctcttcacgttgatgcttggcattccatcagctttctctaagtctttgctcaagttcaaggttaaaatgatgttagacaacaggtcccagtcagtcccctctattttcacccattttgctcacaagccatattggcccgattagtggtactgtctgactcacgtgtgtgatccaaataaaggtagctgccgggaatt

SEQ ID NO: 793 - DNA, 2002 bp, Homo sapien; identical to SEQ ID NO: 792

SEQ ID NO: 794 - protein, 189 aa, Homo sapien
LFSHQRVQAQPTDYGGSFTRRCVEWLLGLYFLSHIPITLFMDLQAVVPRELYPVEFRNLLKWYAKEFKDPLLQEPPAWFKSFLFCELVFQLPFFPIATYAFLKGSCKWIRTPAIIYSVHTMTTLILILSTFLFEDFSKASGFKGQRPETLHERLTLVSVYAPYLLIPFILLIFMLRSPYYKYEEKRKKK

SEQ ID NO: 795 - DNA, 2452 bp, Homo sapien
atgtggcttcatcgagtattcctttgtgaattcctggatgaaattttcaaggcaaacaggaaaagcactgaaattgctgaatggtggcgaacggagccacgagggaagggagcgccgccggcagctgccgggacaccaggataccacgcggccagcaccgaaacgctaggctcgcgctcacaaccgcaatctacactgagtagccgcgcgccgaacggcgtgactaagccccgcccacacggcgctcctggcggccaatggaaatggcttacgagacgccttctccacgcgctatacttatacggaccaatgggtgcgccctgtggggagtgccgccccctgtccacgagcctcctcttctcgccagccaatggaagcggtctgcctagccctcgcgggggcaaggcggcgaccgaggcgcgtgggtctgggaaggcgcgcggatttggcctcttctcacatcagcgggtccaggcccaaccgacagactatgggggctccttcaccaggcgctgcgtggagtggctgctgggcctctacttcctcagccacatccccatcaccctgttcatggacctgcaggcggtcgtgccgcgcgagctctacccagtcgagtttagaaacctgctgaagtggtatgctaaggagttcaaagacccactgctacaggagcccccagcctggtttaagtcctttctgttttgcgagcttgtgtttcagctgcctttctttcccattgcaacgtatgccttcctcaaaggaagctgcaagtggattcgaactcctgcaatcatctactctgttcacaccatgacaaccttaattctgatactctccacatttctgtttgaggatttctccaaagccagtggtttcaagggacaaagacctgagactttgcatgaacggttaacccttgtgtctgtctatgccccctacttactcatcccattcatacttttaattttcatgttgcggagcccctactacaagtatgaagagaaaagaaaaaaaaaatgaaggaaacaaccactggcccagggtagagatgcctacagggtggttgcttgttggatacatacaggaacactgctcagaacccacgtcttcagcagcatttgaaacactggcagcaatgcacaagagcaagatggtgtcaggaaccatgtcaaaccctcaccttcttccattttttttttttttttgagacagtctcactctgttgccaggctggagtaaagggcagtggcatgatctcggctcactgcaacctccgcctcctgggctcaagccatcttccttagcctcccaagtagctagaactacaggtgtgtaccaacacgtatggctaatttgttttgttttttttgtgtgtgtggagacagggttttgccatgttgcccaggttggtctcgaacgcctaggctcaagtgatctgcccacctcagtctccctaagtgctgggattacagacgtgaaccactgggcccagcccaaaccttcaccttctaagggcactgggatgaacagaccgatcggcttgagggtgggcaaaggggtgtgggctaggttataaggaagtggtaccaaataactgtgttgcctgagttccaccgcaagattactaaaagcaggaccagaccagaaactgctaaagaacatggcctgtttgacatgttcatgagtcacctgacccacagcatatatgcttatgactaaaccctccactcctgattctcaagagtgtatcacctgtcagcaaaatgaatagtgggatattttgggccattttaaatgtgaaattttgcctctttaatgttaattcaaaactatatcaatgttttcttgttcccacctctaacccaaggaaaaaagagaaaacatactatgcaaaggaagtttaaacttaagttttccttaagggtcagcccaacaatgactttcagtcaaatggattaaactggaaaatgtttttgtttctgttgtaaacagatcatcctaggcgaaagttttttttgtttgtttgcttttaaattagtttatttctaaatcttagtcttccacatttctagaggccacctgacacaagtccctgtatctgaagtctagcatctcaaggctgatctggaagtgtgctagtatgctccctagtggataacttaatcttttaatacagttccgtcattcccatcttgttttcagaagagaaggtggctacagccaggcataacttatccactgtgtgcatagagggtctcttcacgttgatgcttggcattccatcagctttctctaagtctttgctcaagttcaaggttaaaatgatgttagacaacaggtcccagtcagtcccctctattttcacccattttgctcacaagccatattggcccgattagtggtactgtctgactcacgtgtgtgatccaaataaaggtagctgccgggaatt

SEQ ID NO: 796 - protein, 339 aa, Homo sapien [sequence omitted]

SEQ ID NO: 797 - DNA, 2190 bp, Homo sapien
ggcttacaggagggcagctctgcagttgggaggggcaccgtccggaggagaccaggcctctacacaccccccactctacttatcatccctgctcacacacccttgtccaaggctttatgcatcggatttatttttccaaatcaagaggacagtgatagatgcattttccccaggctgtctcagaaaggtcgctaaatgtatactgttgtcagaattgctgagatctccccccacttttggtttttgcagcagtaaaaactctttccactgtgacttattttctctctcaggcagccagccacctggtcccttgtgctgactctagcacagtggccaggatccaatacgagtccaggggtgaccgcaggatggtgggggcagcgggcttctccacctaccccagccaccaaggccctgacgcactgcctcctgcaccttcagcacatccctgtgcacagctggaagggtgcatggcccgctcacctttgttcagatgggtggaaacgctgatgataccagctcctccctgccgtgcccctgccacggagcaggcattgtgaactggctggtgtttgcagtcccacgtggcatggcctccagcccaacccacagtggagactggagacagggcaatgagtctggtcgggggcacgtggacatgccccataggggccccacccagacttaacaggcaaggtcctgggcattgcgcgacgcaggactcaatgctaaagcaagcctgcctggctctgtgccagggcccctcttctgatttacacatcccatttttacacagacccttccttcttaataaaggctgacagttctgttggcagccaagaacccacaccatgaagacagggagtgaggggcctttgtgcccaactccagcacagctgcgttctggggtgtgtgagaggcatgttcgtgtctgtgcgctggtggtctcgtgagacagttccgaggacggggaaattgcagggtggtgggggcgtgaggcttatatgtggaactgatgcagagttcgcctgcagacggatctggatatacactatgtataattgttacgtgtaatttaaaatatatctgtttgccatcgtcatgagaagattatatgtaaggctctgaagggagagggagatgtacattctgccaggctcctggggaccttatccgagtcatgaaattgatgactgttgatccagtggtgcaagaagctacactccatgtgtcatcacgcttatgactcctaatgtatttttaaggcaaaaaatgtcagccgactccatcttcacccctcgattcctcgagtccagcctttctgtgccagtgcttcactgagccacaacgctctcgccatcgggacccggctgggcctggagtctcggggcacagttgccatggagccctcctgggtcattctacaaatgtgctgagtgccagctgaaaaccccacaggagatggagtaccttggccaagcttaaagagaagattttctcagggtatttattagtgtgtccagcagggtcaggaagcaggatggaaagatgcattcagactgttaatttattaacaaggcaaatgattttgtgtttcttgatgacagactattaagtttgggacttattttcccatttgagaagttataatatatatttaagatgataagtttcctgcttaagttgtgcctttcagcttcaatgagtttaaggagcactaagggtaatgataccaatgagggttggtttattatcaaacctgaatagctgtggtttctccagtaaatattttcttctactgaacatggagccattattaagagttgtgtgttttttattatgtacatttgtatatttttttgcttgtttgatgttctatttttctaatagttttcttttagtttcttaaagttgtgatactagatttagattctgatgctaactgcaaatcaggttggtctctgctgggtctctcctgcttttattttactttaaggacaagtgtagttgtcgtccaccacctttcaaaaaatgtgaaactgccctgcctcccctttttgctgacaacactgtgtacattgaccacttcctaccatactttatgttgtaaaatcaaactcttttgtggtacattatctcatgcttctgcaaattcgaataaattctatggcttccaaaaaaaaaaaaaaa

SEQ ID NO: 798 - protein, 21 aa, Homo sapien
MKLMTVDPVVQEATLHVSSRL

SEQ ID NO: 799 - DNA, 1132 bp, Homo sapien
gcgtcaccacagaggcaagacaagggtccatatcgcggcatccggctcccgcccgtcttcaggagagaaagaaaaaataaaatatacttggggaagttgtacctgccagaattagtaagagctttctttaagaagacatttgtcaaactcaacaaattgaaggttaacaccttaagagttgtagttactgaccagaaatatggacagacttcttagacttggaggaggtatgcctggactgggccaggggccacctacagatgctcctgcagtggacacagcagaacaagtctatatctcttccctggcactgttaaaaatgttaaaacatggccgtgctggagttccaatggaagttatgggtttgatgcttggagaatttgttgatgattataccgtcagagtgattgatgtgtttgctatgccacagtcaggaacaggtgtcagtgtggaggcagttgatccagtgttccaagctaaaatgttggatatgttgaagcagacaggaaggccggagatggttgttggttggtatcacagtcaccctggctttggttgttggctttctggtgtggatatcaacactcagcagagctttgaagccttgtcggagagagctgtggcagtggttgtggatcccattcagagtgtaaaaggaaaggttgttattgatgccttcagattgatcaatgctaatatgatggtcttaggacatgaaccaagacaaacaacttcgaatctgggtcacttaaacaagccatctatccaggcattaattcatggactaaacagacattattactccattactattaactatcggaaaaatgaactggaacagaagatgttgctaaatttgcataagaagagttggatggaaggtttgacacttcaggactacagtgaacattgtaaacacaatgaatcagtggtaaaagagatgttggaattagccaagaattacaataaggctgtagaagaagaagataagatgacacctgaacagctggcaataaagaatgttggcaagcaggaccccaaacgtcatttggaggaacatgtggatgtacttatgacctcaaatattgtccagtgtttagcagctatgttggatactgtcgtatttaaataa

SEQ ID NO: 800 - protein, 310 aa, Homo sapien
MDRLLRLGGGMPGLGQGPPTDAPAVDTAEQVYISSLALLKMLKHGRAGVPMEVMGLMLGEFVDDYTVRVIDVFAMPQSGTGVSVEAVDPVFQAKMLDMLKQTGRPEMVVGWYHSHPGFGCWLSGVDINTQQSFEALSERAVAVVVDPIQSVKGKVVIDAFRLINANMMVLGHEPRQTTSNLGHLNKPSIQALIHGLNRHYYSITINYRKNELEQKMLLNLHKKSWMEGLTLQDYSEHCKHNESVVKEMLELAKNYNKAVEEEDKMTPEQLAIKNVGKQDPKRHLEEHVDVLMTSNIVQCLAAMLDTVVFK

SEQ ID NO: 801 - DNA, 5733 bp, Homo sapien
ggggacattttggattaaccttatgtaggttgccagctaatgaattgtaattgatttcaatcttagctgataaatctaattggtaatttatagaacaaatatttgataagctcctattaattgtcaccccaccaagcggacagctaacatgaattgcacttcactgcagctttagagatcggtttaggctgagacattgcgcctgccttaggttgctgacttctttatttcagagctctggagacacctagtttgaaaaatgttattctgtttttttgtgagaacttagtaaacaagaaaatactcttgagtgaaatgcaatgtatttcttttgtaatcagtgcatttgaaaattcaagccagcatattcctagtagatggaagcaaaattaagttgtctttgtagaaaatgaagagcctttcttccagcaaaaatccctgctgtatgcaatagccctgattaaccctctcccttctgcatgtttcccatattacagacttgagactgtcctcattcccatatgtaatagacatccaaagaatttcaattgctttgttgaacttttactaatgatcttgtttttattttctctcttgtttttggtttttcaccattgatattgtatttagaaggtttcaggtgggtgaaacctcctattccatgcgtaaggtgcctcgctgaagggagctcgaggcctggatctagggcagacacacaacctcctcctcctcttccagcaaggaacgcaccgaaaagtcacatgatgagaaatatggtaacgggtttgtaactgccacagcaaaacaatttgcctccatgcctgaatcttctgtcttgtggcttcagaaacagcttaaaataattttatttacaagcaagttatgtaagagaatgttttatactatagccacaattctgtcaaagataagtaaaagttaattgatattaaaaattattagagataatttacttagtaaaagcttctaactcttcttgttgttcattttttttccttttttcttctttgtttggattgcagcattctgctcttctgatgatgcgctgtgaccctgcagtagcgcaaaggctgcgcagcgttaatgcgcattgcgtgcgaatgaacccctgtgaacggttgactagatgagtaatctgattgactggctccctcagtcctattctgtagcctttttggataaaattgggttttaacatacctcgagtccaactaatctcattaaacaaatattctccatgggcctgtctagtagattaatggatctggttggccgtttgctgcgtctaggggtgttctatgtagcgcagcagttcgcagcgattgcgcagtgcgatgctgttaggttgcgcaagcgatgtttgcgctcgcattacagggacctcaacctaggtgcaatcctgtcatgtgaggtttcagcttcagtcctccttgggagacggggcattgtgagaatgtaacttaaagcctggctttatgatatcctacttggcagaaagacatttttctcctcagtagcatagttttgatgttagtgaggaacattgttgaagagcagcatttcccaaaatgtgtttcatagtattctaataaaatgcccaatgaaagaagagttccatggtcaactaagttcagggaaccctgttacactattaaaggcttagggaagtccagtaaagaaacctattttccgaatttatttgatcatgaactccttttttttcagccatacctcttaacacctcatagaacacacttccggaaacagtgggggtaggaaaactcggcctcaagttgcgccctctaggtagcacttgaaaacatgacaagggcccgtagttgtttggataagagaactccagcatagagccttatagcaactgacttcccagttaagtcccagtgtaagggttggtctttggttggcagaactgaacatggtggtttgcacttgggttctggtggcgcaggcgcaggagcagccagctgtggcagcgcattagttttggcgcaagcgagcctatgctgcagggtcacttttggctggtcagagaaggaataatgatatcaccttcttccccccctccccccaatcttttttttttccctttacaaattttcccctttccctttacctcctttccctcccatcttctttcattaacccctcctaaggcatgttatttgaaagcaattgagacgcaaccgaactttgcagtagcttggagtaatcttggctgtgttttcaatgcacaaggggaaatttggcttgcaattcatcactttgaaaaggctgtcacccttgacccaaactttctggatgcttatatcaatttaggaaatgtcttgaaagaggcacgcatttttgacagagctgtggcagcttatcttcgtgccctaagtttgagtccaaatcacgcagtggtgcacggcaacctggcttgtgtatactatgagcaaggcctgatagatctggcaatagacacctacaggcgggctatcgaactacaaccacatttccctgatgcttactgcaacctagccaatgctctcaaagagaagggcagtgttgctgaagcagaagattgttataatacagctctccgtctgtgtcccacccatgcagactctctgaataacctagccaatatcaaacgagaacagggaaacattgaagaggcagttcgcttgtatcgtaaagcattagaagtcttcccagagtttgctgctgcccattcaaatttagcaagtgtactgcagcagcagggaaaactgcaggaagctctgatgcattataaggaggctattcgaatcagtcctacctttgctgatgcctactctaatatgggaaacactctaaaggagatgcaggatgttcagggagccttgcagtgttatacgcgtgccatccaaattaatcctgcatttgcagatgcacatagcaatctggcttccattcataaggattcagggaatattccagaagccatagcttcttaccgcacggctctgaaacttaagcctgattttcctgatgcttattgtaacttggctcattgcctgcagattgtctgtgattggacagactatgatgagcgaatgaagaagttggtcagtattgtggctgaccagttagagaagaataggttgccttctgtgcatcctcatcatagtatgctatatcctctttctcatggcttcaggaaggctattgctgagaggcacggcaacctgtgcttagataagattaatgttcttcataaaccaccatatgaacatccaaaagacttgaagctcagtgatggtcggctgcgtgtaggatatgtgagttccgactttgggaatcatcctacttctcaccttatgcagtctattccaggcatgcacaatcctgataaatttgaggtgttctgttatgccctgagcccagacgatggcacaaacttccgagtgaaggtgatggcagaagccaatcatttcattgatctttctcagattccatgcaatggaaaagcagctgatcgcatccatcaggatggaattcatatccttgtaaatatgaatggctatactaagggcgctcgaaatgagctttttgctctcaggccagctcctattcaggcaatgtggctgggataccctgggacgagtggtgcgcttttcatggattatattatcactgatcaggaaacttcgccagctgaagttgctgagcagtattccgagaaattggcttatatgccccacactttttttattggtgatcatgctaatatgttccctcacctgaagaaaaaagcagtcatcgattttaagtccaatgggcacatttatgacaatcggatagttctgaatggcatcgacctcaaagcatttcttgatagtctaccagatgtgaaaattgtcaagatgaagtgtcctgatggaggagacaatgcagatagcagtaacacagctcttaatatgcctgttattcctatgaatactattgcagaagcagttattgaaatgattaaccgaggacagattcaaataacaattaatggattcagtattagcaatggactggcaactactcagatcaacaataaggctgcaactggagaggaggttccccgtaccattattgtaaccacccgttctcagtacgggttaccagaagatgccatcgtatactgtaactttaatcagttgtataaaattgacccttctactttgcagatgtgggcaaacattctgaagcgtgttcccaatagtgtactctggctgttgcgttttccagcagtaggagaacctaatattcaacagtatgcacaaaacatgggcctgccccagaaccgtatcattttttcacctgttgctcctaaagaggaacacgtcaggagaggccagctggctgatgtctgcttggacactccactctgtaatgggcacaccacagggatggatgtcctctgggcagggacccccatggtgactatgccaggagagactcttgcttctcgagttgcagcatcccagctcacttgcttaggttgtcttgagcttattgctaaaaacagacaagaatatgaagacatagctgtgaagctgggaactgatctagaatacctgaagaaagttcgtggcaaagtctggaagcaaagaatatctagccctctgttcaacaccaaacaatacacaatggaactagagcggctctatctacagatgtgggagcattatgcagctggcaacaaacctgaccacatgattaagcctgttgaagtcactgagtcagcataaataaagactgcacaggagaattacccctaaaaaaaaaaaaaaaaaagggcggccgagggaactagataacatacttcttacttgtctgtacagtaccttgttgcagatgggtgatatataatggtaatagaatagcacagccagacttgcttcctgcatggtagggagagacacaaaagatgggaaactgcttttccacaaggaatctccgtagaattttgcggcgaccagatggtgcataggtctggaaggtctgatctcccttggtcttccatgggatggttagtgtggaggggagatatagattgtccggccgctttgtgattccatggattgattcagtcttctggatttttttttctttatattttgggtactggagcttttaaaaatgtttggtttcaggtatttttattcatgtgaagtgtatatgattctcttgagataaggttttaagctaaaatgttactccctgttttagtttctgaactctgacagattgacagggactttgctggtgtagtctttttataggttttataaaccacttgagcctatatcagtcgttttagtgtctgacctaatatttggagctatcagtgctttgttgatttagatgatgactcaagattttttctggtccatttcccatttccttttcttccctgacccccataccctcacccttaaaattctcctgtaactcaactaacaaaatcaagcctgattcaaaacatcctagggtgttttaaacacaccatctggtgccaaatgaagatttttaggagtgattactaattatcaagggcacagttgtggtactgtcattgataataatatagtttttttttttttcctaaaaaaaaaaaaaaaaaaaaaaaaaaaaaaaaaaaaaaaaaataaaaaaaaaaaaaaaaaaaaaaaaaaaaac

SEQ ID NO: 802 - protein, 920 aa, Homo sapien
MLQGHFWLVREGIMISPSSPPPPNLFFFPLQIFPFPFTSFPSHLLSLTPPKACYLKAIETQPNFAVAWSNLGCVFNAQGEIWLAIHHFEKAVTLDPNFLDAYINLGNVLKEARIFDRAVAAYLRALSLSPNHAVVHGNLACVYYEQGLIDLAIDTYRRAIELQPHFPDAYCNLANALKEKGSVAEAEDCYNTALRLCPTHADSLNNLANIKREQGNIEEAVRLYRKALEVFPEFAAAHSNLASVLQQQGKLQEALMHYKEAIRISPTFADAYSNMGNTLKEMQDVQGALQCYTRAIQINPAFADAHSNLASIHKDSGNIPEAIASYRTALKLKPDFPDAYCNLAHCLQIVCDWTDYDERMKKLVSIVADQLEKNRLPSVHPHHSMLYPLSHGFRKAIAERHGNLCLDKINVLHKPPYEHPKDLKLSDGRLRVGYVSSDFGNHPTSHLMQSIPGMHNPDKFEVFCYALSPDDGTNFRVKVMAEANHFIDLSQIPCNGKAADRIHQDGIHILVNMNGYTKGARNELFALRPAPIQAMWLGYPGTSGALFMDYIITDQETSPAEVAEQYSEKLAYMPHTFFIGDHANMFPHLKKKAVIDFKSNGHIYDNRIVLNGIDLKAFLDSLPDVKIVKMKCPDGGDNADSSNTALNMPVIPMNTIAEAVIEMINRGQIQITINGFSISNGLATTQINNKAATGEEVPRTIIVTTRSQYGLPEDAIVYCNFNQLYKIDPSTLQMWANILKRVPNSVLWLLRFPAVGEPNIQQYAQNMGLPQNRIIFSPVAPKEEHVRRGQLADVCLDTPLCNGHTTGMDVLWAGTPMVTMPGETLASRVAASQLTCLGCLELIAKNRQEYEDIAVKLGTDLEYLKKVRGKVWKQRISSPLFNTKQYTMELERLYLQMWEHYAAGNKPDHMIKPVEVTESA

SEQ ID NO: 803 - DNA, 2575 bp, Homo sapien
ggaggaggaagcaagcgagggggctggttcctgagcttcgcaattcctgtgtcgccttctgggctcccagcctgccgggtcgcatgatccctccggccggagctggtttttttgccagccaccgcgaggccggctgagttaccggcatccccgcagccacctcctctcccgacctgtgatacaaaagatcttccgggggctgcacctgcctgcctttgcctaaggcggatttgaatctctttctctcccttcagaatcttatcttggctttggatcttagaagagaatcactaaccagagacgagactcagtgagtgagcaggtgttttggacaatggactggttgagcccatccctattataaaaatgtctcagagcaaccgggagctggtggttgactttctctcctacaagctttcccagaaaggatacagctggagtcagtttagtgatgtggaagagaacaggactgaggccccagaagggactgaatcggagatggagacccccagtgccatcaatggcaacccatcctggcacctggcagacagccccgcggtgaatggagccactggccacagcagcagtttggatgcccgggaggtgatccccatggcagcagtaaagcaagcgctgagggaggcaggcgacgagtttgaactgcggtaccggcgggcattcagtgacctgacatcccagctccacatcaccccagggacagcatatcagagctttgaacaggtagtgaatgaactcttccgggatggggtaaactggggtcgcattgtggcctttttctccttcggcggggcactgtgcgtggaaagcgtagacaaggagatgcaggtattggtgagtcggatcgcagcttggatggccacttacctgaatgaccacctagagccttggatccaggagaacggcggctgggatacttttgtggaactctatgggaacaatgcagcagccgagagccgaaagggccaggaacgcttcaaccgctggttcctgacgggcatgactgtggccggcgtggttctgctgggctcactcttcagtcggaaatgaccagacactgaccatccactctaccctcccacccccttctctgctccaccacatcctccgtccagccgccattgccaccaggagaaccactacatgcagcccatgcccacctgcccatcacagggttgggcccagatctggtcccttgcagctagttttctagaatttatcacacttctgtgagacccccacacctcagttcccttggcctcagaattcacaaaatttccacaaaatctgtccaaaggaggctggcaggtatggaagggtttgtggctgggggcaggagggccctacctgattggtgcaacccttaccccttagcctccctgaaaatgtttttctgccagggagcttgaaagttttcagaacctcttccccagaaaggagactagattgcctttgttttgatgtttgtggcctcagaattgatcattttccccccactctccccacactaacctgggttccctttccttccatccctaccccctaagagccatttaggggccacttttgactagggattcaggctgcttgggataaagatgcaaggaccaggactccctcctcacctctggactggctagagtcctcactcccagtccaaatgtcctccagaagcctctggctagaggccagccccacccaggagggagggggctatagctacaggaagcaccccatgccaaagctagggtggcccttgcagttcagcaccaccctagtcccttcccctccctggctcccatgaccatactgagggaccaactgggcccaagacagatgccccagagctgtttatggcctcagctgcctcacttcctacaagagcagcctgtggcatctttgccttgggctgctcctcatggtgggttcaggggactcagccctgaggtgaaagggagctatcaggaacagctatgggagccccagggtcttccctacctcaggcaggaagggcaggaaggagagcctgctgcatggggtggggtagggctgactagaagggccagtcctgcctggccaggcagatctgtgccccatgcctgtccagcctgggcagccaggctgccaaggccagagtggcctggccaggagctcttcaggcctccctctctcttctgctccacccttggcctgtctcatccccaggggtcccagccaccccgggctctctgctgtacatatttgagactagtttttattccttgtgaagatgatatactatttttgttaagcgtgtctgtatttatgtgtgaggagctgctggcttgcagtgcgcgtgcacgtggagagctggtgcccggagattggacggcctgatgctccctcccctgccctggtccagggaagctggccgagggtcctggctcctgaggggcatctgcccctcccccaacccccaccccacacttgttccagctctttgaaatagtctgtgtgaaggtgaaagtgcagttcagtaataaactgtgtttactcagtgaaaaaaaaaaaaaaaaaa

SEQ ID NO: 804 - protein, 233 aa, Homo sapien
MSQSNRELVVDFLSYKLSQKGYSWSQFSDVEENRTEAPEGTESEMETPSAINGNPSWHLADSPAVNGATGHSSSLDAREVIPMAAVKQALREAGDEFELRYRRAFSDLTSQLHITPGTAYQSFEQVVNELFRDGVNWGRIVAFFSFGGALCVESVDKEMQVLVSRIAAWMATYLNDHLEPWIQENGGWDTFVELYGNNAAAESRKGQERFNRWFLTGMTVAGVVLLGSLFSRK

SEQ ID NO: 805 - DNA, 2394 bp, Homo sapien
ggcacgaggcgtcccggcgccactcggcccagggcagggaccccgccacggccgggaccgcccggcccggccccagcccgcgcctctccgcgccgccccgcgctccgcaccgcgccctctccgcgtccccgcccgcgcggccggaccgggcagccagaaaaatcatttttcttctctgggaaggtgaacatttgtagcattgatttcccggatctggtaacatggcaaaagatgccggtctaattgaagccaacggagaactcaaggtcttcatagaccagaaccttagtcccgggaaaggcgtggtgtccctcgtggccgttcacccctccaccgtcaacccgctcgggaagcagctcttgccaaaaacctttggacagtccaatgtcaacattgcccagcaagtggtaattggtacgcctcagagaccggcagcgtcaaacaccctggtggtaggaagcccacacacccccagcactcactttgcctctcagaaccagccttccgactcctcaccttggtctgccgggaagcgcaacaggaaaggagagaagaatggcaagggcctacggcatttctccatgaaggtctgcgagaaggtgcagaggaaagggaccacttcctacaacgaagtggcagacgagctggttgcggagttcagtgctgccgacaaccacatcttaccaaacgagtcagcttatgaccagaaaaacataagacggcgcgtctacgatgccttaaacgtgctaatggccatgaacatcatctccaaggagaagaaggagatcaagtggattggtctgcccaccaactcggctcaggaatgtcagaacttagaggtggaaagacagaggagacttgaaagaataaaacagaaacagtctcaacttcaagaacttattctacagcaaattgccttcaagaacctggtgcagagaaaccggcatgcggagcagcaggccagccggccaccgccacccaactcagtcatccacctgcccttcatcatcgtcaacaccagcaagaagacggtcatcgactgcagcatctccaatgacaaatttgagtatctgtttaattttgacaacacatttgaaatccacgatgacatagaagtgctgaagcggatgggcatggcttgcgggctggagtcggggagctgctctgccgaagaccttaaaatggccagaagtctggtccccaaggctctggagccatacgtgacagaaatggctcagggaactgttggaggcgtgttcatcacgacggcaggttccacgtctaacggcacaaggttctctgccagtgacctgaccaacggtgcagatgggatgctggccacaagctccaatgggtctcagtacagcggctccagggtggagactccggtgtcctacgtcggggaggacgacgaggaggacgatgacttcaacgagaatgacgaggacgactgacgtcctccccacttcagattcggcttcaggaaaacgtttagcgaaaagaaactttttttttaatgtgggttttctgtttccttttggcctactcccaagaagatattggtaagctattgaatttagatatgcacctctgataagcaaggattgtttcccgtaggattaggacgtgctgtggatgtgtgttttgataccagtgtgctgatgcagagcgtttatttagttgttaggattttgtgttttcatttgctatttttctttaagtgcagagttcatttttgcccctgaaaagtttttgctgagtttgctgaagaaattgtatttcaaccacatccatgaaaataaaacacctcctgttgtggatggtgagcccctgatgccgcttatttgccgtgagtttggacggcacccctgctggcggatagcaagactctgtggagtttgttcagtggtacggtgtccaagcaaacagcagaatgcaactttctaaacagccccaagcaaacagcagaattcaactttttaaacaataaacaccatcaaccttattgactttattgtcccttaaattatattgactgttgtgattccatcaagtttgtacactcttttctctccctgttttgcagcaacaaattgcgaagtgcttttgtttgtttgttttcgtttggttaaagcttattgccatgctggtgcggctatggagactgtctggaaggcttggaatggtttattgcttatggtaaaatttgcctgatttcttacaggcagcgtttggaaaccttttattatatagttgtttacatacttataagtctatcatttaaagacatgtactgaaacaaatgtatttgtttcataagcatcttcctgtaatctattataaaattgaaattaaatatagagaatgttttaacaaaaaaaaaaaaaaaaaaaa

SEQ ID NO: 806 - protein, 410 aa, Homo sapien
MAKDAGLIEANGELKVFIDQNLSPGKGVVSLVAVHPSTVNPLGKQLLPKTFGQSNVNIAQQVVIGTPQRPAASNTLVVGSPHTPSTHFASQNQPSDSSPWSAGKRNRKGEKNGKGLRHFSMKVCEKVQRKGTTSYNEVADELVAEFSAADNHILPNESAYDQKNIRRRVYDALNVLMAMNIISKEKKEIKWIGLPTNSAQECQNLEVERQRRLERIKQKQSQLQELILQQIAFKNLVQRNRHAEQQASRPPPPNSVIHLPFIIVNTSKKTVIDCSISNDKFEYLFNFDNTFEIHDDIEVLKRMGMACGLESGSCSAEDLKMARSLVPKALEPYVTEMAQGTVGGVFITTAGSTSNGTRFSASDLTNGADGMLATSSNGSQYSGSRVETPVSYVGEDDEEDDDFNENDEDD

SEQ ID NO: 807 - DNA, 1235 bp, Homo sapien
  Unsure 648-685: Unknown base
acttatacatctgtaaaggtggtttcagggacctttctgaacttagcccgtatctcactggtgatcccacttctgggtatttgcaaatcactttattaggtttttaaaagtattgttgcaggcatgcgaaggggccgatatacttttgccatgtccagagtgtattcaggtcttgtaatgatcatatgggtgtaatattgagtaacaggcaaatgtgggcagaaaatatcaaatgtggttttcagctaagaagtctggttgctcttaattttcagttactctccattgcatagaataaagccccgaagaaacgaagaataagatcatggggaaacttggcttccatgttaaaccgtgtaataccaggtgttagaatagtagtaaaggacttgtttctttcacatctatatacactcaaaagacctcatcgatcttggaaaaacattgtttcgaagacaatgtgtatgactgatttggttatatgaagaaattatttctaggatttcctggtaattctgtgataaacagtaatacaaactggaatttttacaggtcactatagtagaggttttagtttgatttttgctttgcctgtcatgctctctctgccttataattctttgtggtgtaattaaaaaacgaacactnnnnnnnnnnnnnnnnnnnnnnnnnnnnnnnnnnnnnntgcaaacacattttaattgacaacactagggctgttgtacaaaatagtaatgatagccatggaagttttaccttattctgtgagaagtgttcttaaacttattaagtgtctaaactaaggtttagtgcttttttaaaggaaagttgtcccaggattcatcctaaagaaagcaaaagttaattcaactgatccaccaatggaattagatgggtagagttgggttcttgagttttaccaccacttagttcccactgaattttgtaacttcctgtgtttgcatcctctgttcctattctgcccttgctctgtgtcatctcagtcatttgacttagaaagtgcccttcaaaaggaccctgttcactgctgcacttttcaatgaattaaaatttatttctgttctagtgggaatgtgtcctttgttttagttcacaagtagtaattttgacaagatgctttcttctgatgcagtttgttttaatcactcacctagtactagaaatggctttctagtcagatcctatagtctctacctgtatagctcttacataca

SEQ ID NO: 808 - protein, 32 aa, Homo sapien
MLSSDAVCFNHSPSTRNGFLVRSYSLYLYSSY

SEQ ID NO: 809 - DNA, 3773 bp, Homo sapien; identical to SEQ ID NO: 720

SEQ ID NO: 810 - protein, 209 aa, Homo sapien; identical to SEQ ID NO: 721

SEQ ID NO: 811 - DNA, 879 bp, Homo sapien
cgcgggcgggaggatggagctgaactccctgctgatcctgctggaggcggccgagtacctggagcgcagggatcgagaggccgagcacggctacgcctcggtgctgcccttcgacggcgacttcgccagggagaaaacaaaggcggccggcctggtgcgcaaggccccgaacaacaggtcttcacacaacgagctagaaaagcacagacgagccaaactcaggctgtaccttgagcagctcaagcaactggtgcccctgggccccgacagcacccgccacaccacgctgagcctcctgaagcgggccaaggtgcacatcaagaaactggaggagcaggaccgccgggcactgagcatcaaggagcagctgcagcaggagcatcgtttcctgaagcggcgcctggagcagctgtcggtgcagagcgtggagcgcgtgcgcacagatagcacgggctctgctgtctccacggacgactcagagcaagaagtggacatagagggcatggagtttggccctggtgagctggacagtgttggcagcagcagtgacgcggacgaccactacagcctgcagagtggcaccggcggcgacagtggcttcgggccccactgccggcggctgggccgccccgccctctcgtaggcccgtgccctctgctccttggcctgcctgcccgccagccacgcgtgtcagccctccagttctccttcagttgacgccagcctctccacaggcccactgctgtgccattctggaagctccagctgctgctgggctgcctggcactgcccgcttgccggtcagggcctgccgagctgcctgccccttccagctgggcagagtcccctgcaaggaggcagggcccagcttccacatcc

SEQ ID NO: 812 - protein, 209 aa, Homo sapien; identical to SEQ ID NO: 721

SEQ ID NO: 813 - DNA, 3655 bp, Homo sapien
gttggagcggcgctgctcggccgcggacacacgagggacgcgcccgaggagctgcaggtggcagcccaggcggtccgaacccgtcggccggccgagcctggagtattgcctaagtgtaatcttgaacatgggcggtgctgtgagtgctggtgaagacaatgaagagctgatagataatttgaaagaagcacagtatatccggactgagctggtagagcaggctttcagagctatcgatcgtgcagactattatcttgaagaatttaaagaaaatgcttataaagacttggcatggaagcatggaaacattcacctctcagccccgtgcatctactcggaggtgatggaagccctagatctgcagcctggactctcgtttctgaacctgggcagtggcactgggtatctcagctccatggtgggcctcattctaggtccttttggtgtgaaccatggggtggaacttcactcagatgtgatagagtatgcaaagcagaaactggacttcttcatcagaacaagtgatagttttgacaagtttgacttctgtgaaccttcctttgttactgggaattgcctggagatttctccggattgttctcagtatgatcgtgtatactgtggggctggcgtgcagaaagagcatgaagagtacatgaagaatcttctcaaagtgggagggatccttgtcatgccactggaagagaagttgactaagataacacgcacaggtccttcagcttgggaaaccaaaaagattcttgctgtttcttttgctcctctgatccagccctgccattcagagtcaggaaaatcaagacttgtccagttaccaccagtggcagttcgcagcctccaggacttggctcgcatcgccatccggggcaccattaaaaagattattcatcaggaaactgtgagcaaaaacggaaacggactaaagaacacccccaggtttaaacgaaggagagttcgccgccgtcgaatggaaacgattgtctttttggacaaagaagtctttgccagtcggatttccaacccctcagatgacaacagctgtgaagacttggaagaggaacggagggaagaagaagagaagaccccgccggaaacaaagccagaccccccagtgaacttcctacgccagaaggtcctgagcctccctctgccagatcccctgaaatactacttgctttattacagagaaaaataagtctcctgtttgaaagggggaaataggaagagcagattgctgagtgtgaagttcgtgctgcctgtgtgctgttgaagggtcacctggaggcagacgttgtggggaagggaactgctgggctcatccacaccatggttttcttctagttcctgattgacctctaaaattctattcagttgtatgatttgtttacatagttccacaagaccttcattgcatagaagattgttttcccaaagtggagagaatcttcatagagaaaaagagaaggctgtttctttttcggctctgacgaaacactgaagtctgcgtaagagagactgtttgatgaccgtccctcatgcaacatgcacggtactcactaaaaatgaaaactgaagtggaaactaacctgtgttgcttataaagtgtgaaagcacaagcttataaatgtataaaatcttttctgggtgtgacgcacctgcgtccaagtttgaatttttatgatatgtaccacttaattactggcactgagtatcactgaatttcttagttttctagtggggaaacattattgagaagccctcccttattttaagtaagttgattaaatcttatgtgagttgccagttgtaatttttcaaaggaaaaattttgatggggtggaggaatgaattgccagataatctttctggaattccgagagaattccaaagagggtttttttttttttttttttaggacatcttttgatacctttaaaagaaccactgtcaagtaatccttaaaaaaatatcttggaaaaggaaacagattttttcctgtgtgtaagcaataagtgaagttacatttgccctaaccctagggatgattctttacccagttttaaagcccatcatggtattctaaggtgttgacaccctccatcctcagagcaggtcgaaaatattaaatagactggggactctatgatgggcagcctgtgctttttgacttcagtttgctatttttctgtgatcacattagtactgattcatagattctatcttttataattctggagaaaaagatttgttagttttgtaatttttttgtaagaccaaatgtatgtattttagtagctccattgcatgagaagagtgtaactcacactgacttgtgatatcagccttctctgggccttgtgtgtggagagctttctatcttaccaagtggtagggctaaaagaacaacagcctttttggtagtcacatagcagaatgatcagagttacattgcttattccaaaacattggttctttttaaaacatttttttttacccaaagaaaagaataatagaaattactaacaataaatataaattcagagtgttgatataggattcagtatccagagtttatttttaatcttaatcctcagcttcttgggagttgctgggcttcagtgtctctgtggtttcaccagcttagcttgagctctggttattttggatcttttctgctttttttaagtaactgagtcatttttaccacacagtccagtttgcatgtatagctaggaaacatgtattgctctagattgggcagtttaagtcattttaaagaaagttagttcatagttgttgccttttaactcatagtcaagcttcagtctttcaaagagaaatgtgtgattttcatttacttgctgatattttgtagtttggagatccttgtgggcattattctaactgatacgtagacacttacttggaaatttttggacattatattaaatgagtgctatctgtgaaattggttatattaggtggcttgactaatgttttttctataattgtatatggactgcatttttaaaaaaaccgcatttgcctttatgctagattgtaaaaaattatattagaatgcataagacatgtttttccttcatatgctagacttttcctagcatttcgtatttctgtgttgtcagtgtgtgatttttaaaccggaatttggtttaaaaaaaatctggtggtaatatatgtgagaaatactttggtgtttaccttatgaaaataaaggattgtaagtaaagtttcctgcgcaccttataccagaattcagtataatacactactttctgttttcaaacagataaatcataatatagtctgtattatctgtaagatctgtcttgtaaaccacattcttgacaactatttgcttttgagtagtttgtattttaatatgtgacttttgtcttgaaaagtagtaaagccatagacttgtgcaaaacaagtttcaagtttatagatattaagtttgtaatgtgagcatcaaatgtgtatgtaaaaatactttttaccagtctggaacttgggaaaatccagggaatttgaaacatagattttaatgagctggtaaacacaaatcatgtcaataaaggtagtcaggatattttatccttagcattgcttctgc

SEQ ID NO: 814 - protein, 361 aa, Homo sapien
MGGAVSAGEDNEELIDNLKEAQYIRTELVEQAFRAIDRADYYLEEFKENAYKDLAWKHGNIHLSAPCIYSEVMEALDLQPGLSFLNLGSGTGYLSSMVGLILGPFGVNHGVELHSDVIEYAKQKLDFFIRTSDSFDKFDFCEPSFVTGNCLEISPDCSQYDRVYCGAGVQKEHEEYMKNLLKVGGILVMPLEEKLTKITRTGPSAWETKKILAVSFAPLIQPCHSESGKSRLVQLPPVAVRSLQDLARIAIRGTIKKIIHQETVSKNGNGLKNTPRFKRRRVRRRRMETIVFLDKEVFASRISNPSDDNSCEDLEEERREEEEKTPPETKPDPPVNFLRQKVLSLPLPDPLKYYLLYYREK

SEQ ID NO: 815 - DNA, 2376 bp, Homo sapien
cgagggcagcgccggtcgggagcgcagcgcggcgcagctcggcgcgcacggcgggagcggcgcgcgagtggtcgggcctggcggctggacgggcgcccctcgctgccccgcgcgctccccgccgccccccatgagcgcagccccgcgcggcccgggtccgtaggcggcggggcgccccccatgctgctgcagcccgcgccgtgcgccccgagcgcgggcttcccgcggcccctggccgcccccggcgccatgcacggctcgcagaaggacaccacgttcaccaagatcttcgtgggcggcctgccgtaccacactaccgacgcctcgctcaggaagtacttcgagggcttcggcgacatcgaggaggccgtggtcatcaccgaccgccagacgggcaagtcccgcggctacggcttcgtgaccatggccgaccgggcggcagctgagagggcttgcaaagacccgaaccccatcatcgacggccgcaaggccaacgtgaacctggcatatctgggcgccaagccgcggagcctccagacgggctttgccattggggtgcagcagctgcaccccaccttgatccagcggacttacgggctgaccccgcactacatctacccaccagccatcgtgcagcccagcgtggtgatcccagccgcccctgtcccgtcgctgtcctcgccctacattgagtacacgccggccagcccggcctacgcccagtacccaccggccacctatgaccagtacccatacgccgcctcgcctgccacggctgccagcttcgtgggctacagctaccctgccgccgtgccccaggccctctcagccgcagcacccgcgggcaccactttcgtgcagtaccaggcgccgcagctgcagcctgacaggatgcagtgaggggcgttcctgccccgaggactgtggcattgtcaccttcacagcagacagagctgccaggccatgatgggctggcgacagcccggctgagctttagtgaggtgccaccagcacccgtgcctccgaagaccgctcgggcattccgcctgcgccctgggacagcggagagatggcttctctttaatctaggtcccattgtgtcttgagggaggactttaagaatgactgagaactatttaaagacgcaatcccaggttccttgcacaccatggcagcctcttcttgcaccttctcctgcctctccacactccaggttccctcaggcttgtgtccccactgctgcatcgtggcggggtgtcacagaccctctgcagcccctggctgccctggactgtgcagagatgcctgactccagggaaacctgaaagcaagaagttaatggactgtttattgtaacttgatcctcccgagctgtgagcgcagtctgaggtgtgaggacacggcctcctgttggagtcccattttctccatcagggcacgtgggcggcttcctcaagcccggaggagctcccaggcgcacaggggccgccggtaacaggggccgccggccaaaggcccctttccagtcatagcactgaagttgcaacttttttcttgtaattgttttgctactaagataatttcagaagttcagtctattttttcagcggatactgccgccaccaagaatccaaaacctatttttgacttggagagacttgcttttgttggttccgcccgtggagacgacgacagtgtttctgtataataaagtgtctgccggctcgcgggccaggatcctctcggtgggatgggcaccacagacaggaggcccctcaggcccgtgcgggccactgtctgctgccgcctgccggggtggcagagtgagttgtctcaggaccccgtcactgcgacgttgacactctctccttccttccttccccaactccccaaacactgtggaagggaagaaggaagtgatccacagcattcaggccacttggggtctagaccatggtggtgccagcctggggggggcagtggccctcagctctgcccgctggagcggttgagtgcagaagggtgcgcctcttccctctacccccgcaccacctgctgtgtgccagcctgagacggttcctgcctgtcttgggggttggtggagggtggaggcagttctgccagccgtggcagggctgctatggggcatccagggctgtgggggtctggaggaggggacatgaggtgagaggtatcctggccgagggcggggggcagcggggggtctccctccggacctacctcagggagctgagcgtgcaggcgctccagggcaggcctgggacagagtcaaggctcagagaataaaggtagctaatctcatcataatatttttattagaatgttctgatgataaaaataaaacttgttttcttt

SEQ ID NO: 816 - protein, 216 aa, Homo sapien
MHGSQKDTTFTKIFVGGLPYHTTDASLRKYFEGFGDIEEAVVITDRQTGKSRGYGFVTMADRAAAERACKDPNPIIDGRKANVNLAYLGAKPRSLQTGFAIGVQQLHPTLIQRTYGLTPHYIYPPAIVQPSVVIPAAPVPSLSSPYIEYTPASPAYAQYPPATYDQYPYAASPATAASFVGYSYPAAVPQALSAAAPAGTTFVQYQAPQLQPDRMQ

SEQ ID NO: 817 - DNA, 2049 bp, Homo sapien; identical to SEQ ID NO: 648

SEQ ID NO: 818 - protein, 248 aa, Homo sapien; identical to SEQ ID NO: 649

SEQ ID NO: 819 - DNA, 3766 bp, Homo sapien
cggcaccgtcgtaggtgcgggccgcatgaatggagcgccgggcgtaaggcaaagcctggcaccgtctgcgcggccgctatctgctcccggagcgtgagtgcggggtgtggggcgtgcgcgtgcgcgctcagagggggctcaaggcgagcgcgccgggcagttgcgggcgcgtggctgctgaggttggcggcggtgccgcgcgcccgacgggccggtggttgcggggcctcccgcctcgacccgggctgggggcagccgtggcgggcgccggggaccgcaaggggcggaggaaaggagggggccggtcccggcacgcagaggagcagccgaccatgccccgagacaacatggcctccttgatccaacggatcgcccgccaggcttgcctcaccttccggggcagcgggggcggccgcggcgcttccgatcgcgacgcggcttctggcgcggaggcgccgatgcagccgggcttccccgagaacctgagcaagctgaagagcctcctgacccagctccgcgccgaggacttgaacatcgccccgcgcaaggccacactgcagccgctgccgcccaacctgccgccagtcacctacatgcacatctacgagacggacggcttcagcctgggcgtgttcctgctcaagagcggcacgtccatcccgctgcacgaccacccgggcatgcacggcatgctcaaggtgctgtacggcaccgtgcgcatcagctgcatggacaagctagacgcgggcggcgggcaacggccgcgggccttgccgcccgagcagcagttcgagccgccgctgcagccccgggagcgagaagccgtgcggccgggcgtgctgcgttcgcgggccgagtacaccgaggccagcggcccctgcatcctcacaccgcaccgggacaacctgcaccagatcgacgccgtggaagggcctgccgccttcctggacatcctggccccgccctacgacccggacgatggccgggactgccactattaccgggtgctggagccggtcaggcccaaggaggcctccagctcggcctgtgacctgcctcgagaggtgtggctcctggagaccccacaggccgatgacttctggtgcgagggagaaccctatccaggtcccaaggtcttcccttgaagccactggcgcccaggagcggtgggccgaagacgtgccctaccctaccacaagggctgtgtctctaccccctagcctgggcgttggatctactggaatgagcagcagccgcttcctcggcagccttgggaagcacgggcgactggacagcagccgccgggcacggttatgggggcggggtgggcggggaggctagattgtttcctggtactgtcactgccactggggctttgatttggaggaatggggcaggggactatctgaagcgcttccatcctaaagccataatgaaaatatcttcctctcttccccattctatacaaaatactaagtggttttcttgctcccactccctaccccttagttaaatagggtttattttccactcatgcccttatgcctttttttcttatagttttttaacttattgactgtgcatgacccagtggtttgaattgtttttagttcaagtcattggtaaaaactaggtttaaggagatgagctactgtttaaagtgagctggcctgcctaattaattccttgtgaaaactaaatgattttttcagtttggggatcattctcacaacataactatgcatgtagaggacaagatttattttcttttctccctttgcccagtagccacatctggtttactcaggcagcatctactaagaaattcagcacctgcatatctctgtgacatggtcacttagagcttatcttccctatgaatctccagatctgtgagtcgagcagatttcatgttgcagattcacctttaatgcaaagactgtattatcctcacatgactttttttcttgtcttactgtaccttaaaaggtgatagagtaattctgtattttctaacgggaagattcaaaggagctgaatgtgttatgcttccaaacaactgaatgtaaaacactcctagccagttgttgcattccctatatttatttacttccaatattttactgtaaaagtagggagaaatattatgttgatagttgtttcatattctctcaggaactttaatgttcccgactcgggtgattccagctgtgttgctggcagtgttgtctcaaccctctccctaaaatgactgagccctgggttcatctaatgtggttttccttaggaagagatagaaggcacagaagatcacagctagagaattgagaattaactatactactagccattttagggcaccaaaacttgggattaaacacttcctacttcccactcccaactcctgaaatgaagtcttgctatctgtgactagttttatttttgtgcttttaatagtccgagcagtcttaccttgtttacacatgtattgacaccatttgcttcaggccatggagcactgtttctccctttttactatttataggattccgttttttcacaagacttttaataaaaagaaattgtagaaataaacacattaaaatttgcccagctgtcgtctaagccctcttgattgacttgcccaagtggcaatagagttctaatatctataataaagggagatttgctattattagtggaatgttgaccccgtatgtagagaaacagtacgtgcctttgcctctttatgcacacagagacccagggtgagggagtatttgttcccagtttttaagatagtataaaaaagcaaatacttggtgagtgatttaaaaataaaaccaaaacaaaacacaaaaagatattccacaggacatgccactttattataaaacctgacacaggcatagtaccaagtatttcctgcattgttgctaaaattgttttattgtagctccacattctggtgtagtttaaaatgcctttgggggcagtttgaagcagttcttcatgccacttagtttgaaaataaaattctagatatgcaaatgattttcttagaaaacttcacaaaataaaagatcttgtttttttttccatagcacagtaatgaatgtggttatcaatcacatacttttttggattatattgtagcaaaaagttgattagcttaccaagattattaatagcaatgtatgtgttataatacaacttagtacattaaagctacgaaaactcatcctggctgtaggatagtaataaaggaagaattatgacttcattatgaaaaaaagaagttttaaagttttcaattacgagcaatttggaagaaaaaacctaaggtgcttttcaaaagagtaactgaaattgttgcaggccaaaacagcaatatgatatctcagatttagttcaataagaacagtgaaacttttggttcactaataaattctgagtaaattagtggtgaagacaaaatataacttgttttagtgagccactgaggaaagaatatgcttattacaaagacaaaatgtggtgcagaaactatcttgcacctgtgtgcataaactgttagtcgtgactgacttggtgtgttgctattgtgtttctatatactccgtccaatatagataatgttttaataacaactgtgggataaaagttatcttccccttggaaagactaatgagcacaatgatattaatcacttttatggtgaataataaatgcaataattgcctcatgggtgagaaattgtctgtcc

SEQ ID NO: 820 - protein, 270 aa, Homo sapien [sequence omitted]

SEQ ID NO: 821 - DNA, 2513 bp, Homo sapien
gggggagagggggctcaaggcgagcgcgccgggcagttgcgggcgcgtggctgctgaggttggcggcggtgccgcgcgcccgacgggccggtggttgcggggcctcccgcctcgacccgggctgggggcagccgtggcggccgccggggaccgcaaggggcggaggaaaggagggggccggtcccggcacgcagaggagcagccgaccatgccccgagacaacatggcctccttgatccaacggatcgcccgccaggcttgcctcaccttccggggcagctggggcggccgcggcgcttccgatcgcgacgcggcttctggcgcggaggcgccgatgcagccgggcttccccgagaacctgagcaagctgaagagcctcctgacccagctccgcgccgaggacttgaacatcgccccgcgcaaggccacactgcagccgctgccgcccaacctgccgccagtcacctacatgcacatctacgagacggacggcttcagcctgggcgtgttcctgctcaagagcggcacgtccatcccgctgcacgaccacccgggcatgcacggcatgctcaaggtgctgtacggcaccgtgcgcatcagctgcatggacaagctagacgcgggcggcgggcaacggccgcgggccttgccgcccgagcagcagttcgagccgccgctgcagccccgggagcgagaagccgtgcggccgggcgtgctgcgttcgcgggccgagtacaccgaggccagcggcccctgcatcctcacaccgcaccgggacaacctgcaccagatcgacgccgtggaagggcctgccgccttcctggacatcctggccccgccctacgacccggacgatggccgggactgccactattaccgggtgctggagccggtcaggcccaaggaggcctccagctcggcctgtgacctgcctcgagaggtgtggctcctggagaccccacaggccgatgacttctggtgcgagggagaaccctatccaggtcccaaggtcttcccttgaagccactggcgcccaggagcggtgggccgaagacgtgccctaccctaccacaagggctgtgtctctaccccctagcctgggcgttggatctactggaatgagcagcagccgcttcctcggcagccttgggaagcacgggcgactggacagcagccgccgggcacggttatgggggcggggtgggcggggaggctagattgtttcctggtactgtcactgccactggggctttgatttggaggaatggggcaggggactatctgaagcgcttccatcctaaagccataatgaaaatatcttcctctcttccccattctatacaaaatactaagtggttttcttgctcccactccctaccccttagttaaatagggtttattttccactcatgcccttatgcctttttttcttatagttttttaacttattgactgtgcatgacccagtggtttgaattgtttttagttcaagtcattggtaaaaactaggtttaaggagatgagctactgtttaaagtgagctggcctgcctaattaattccttgtgaaaactaaatgattttttcagtttggggatcattctcacaacataactatgcatgtagaggacaagatttattttctttcctccctttgcccagtagccacatctggtttactcaggcagcatctactaagaaattcagcacctgcatatctctgtgacatggtcacttagagcttatcttccctatgaatctccagatctgtgagtcgagcagatttcatgttgcagattcacctttaatgcaaagactgtattatcctcacatgactttttttcttgtcttactgtaccttaaaaggtgatagagtaattctgtattttctaacgggaagattcaaaggagctgaatgtgttatgcttccaaacaactgaatgtaaaacactcctagccagttgttgcattccctatatttatttacttccaatattttactgtaaaagtagggagaaatattatgttgatagttgtttcatattctctcaggaactttaatgttcccgactcgggtgattccagctgtgttgctggcagtgttgtctcaaccctctccctaaaatgactgagccctgggttcatctaatgtggttttccttaggaagagatagaaggcacagaagatcacagctagagaattgagaattaactatactactagccattttagggcaccaaaacttgggattaaacacttcctacttcccactcccaactcctgaaatgaagtcttgctatctgtgactagttttatttttgtgcttttaatagtccgagcagtcttaccttgtttacacatgtattgacaccatttgcttcaggccatggagcactgtttctcccttttttactatttataggattccgttttttcacaagacttttaataaaaagaaattgtagaaataaacacattaaaataaaaaaaaaaaaaaaaaaaaaaaaaaaaaa

SEQ ID NO: 822 - protein, 228 aa, Homo sapien
MQPGFPENLSKLKSLLTQLRAEDLNIAPRKATLQPLPPNLPPVTYMHIYETDGFSLGVFLLKSGTSIPLHDHPGMHGMLKVLYGTVRISCMDKLDAGGGQRPRALPPEQQFEPPLQPREREAVRPGVLRSRAEYTEASGPCILTPHRDNLHQIDAVEGPAAFLDILAPPYDPDDGRDCHYYRVLEPVRPKEASSSACDLPREVWLLETPQADDFWCEGEPYPGPKVFP

SEQ ID NO: 823 - DNA, 597 bp, Homo sapien
atgcccctaggtctcctgtggctgggcctagccctgttgggggctctgcatgcccaggcccaggactccacctcagacctgatcccagccccacctctgagcaaggtccctctgcagcagaacttccaggacaaccaattccaggggaagtggtatgtggtaggcctggcagggaatgcaattctcagagaagacaaagacccgcaaaagatgtatgccaccatctatgagctgaaagaagacaagagctacaatgtcacctccgtcctgtttaggaaaaagaagtgtgactactggatcaggacttttgttccaggttgccagcccggcgagttcacgctgggcaacattaagagttaccctggattaacgagttacctcgtccgagtggtgagcaccaactacaaccagcatgctatggtgttcttcaagaaagtttctcaaaacagggagtacttcaagatcaccctctacgggagaaccaaggagctgacttcggaactaaaggagaacttcatccgcttctccaaatatctgggcctccctgaaaaccacatcgtcttccctgtcccaatcgaccagtgtatcgacggctga

SEQ ID NO: 824 - protein, 198 aa, Homo sapien
MPLGLLWLGLALLGALHAQAQDSTSDLIPAPPLSKVPLQQNFQDNQFQGKWYVVGLAGNAILREDKDPQKMYATIYELKEDKSYNVTSVLFRKKKCDYWIRTFVPGCQPGEFTLGNIKSYPGLTSYLVRVVSTNYNQHAMVFFKKVSQNREYFKITLYGRTKELTSELKENFIRFSKYLGLPENHIVFPVPIDQCIDG

SEQ ID NO: 825 - DNA, 3254 bp, Homo sapien
caccgtccgcagcccgagcgccccggagccgcaggcgccgccgcgcagagacgccgcggctgcgactaggcgcgcccagccgcacgtggcggacccgcccccaggcccgcagtgtcctggaccccgcaggcctccgctctcctgtcctcggccccgtccccagggccgcgatgagcttcctgagccgacagcagccgccgccaccccgccgcgccggggcggcctgcaccttgcggcagaagctgatcttctcgccctgcagcgactgtgaggaggaggaagaagaggaggaggaggagggcagcggccacagcaccggggaggactcggcctttcaagagcccgactcgccgctgccgcccgagcggagccccacggagcccgggcccgagcgccgccgctcgcccgggccggcccccggcagccccggcgagctggaggaggacctgttgctgcccggcgcctgcccgggcgcggacgaggcgggcggtggggcggagggcgactcgtgggaggaggagggcttcggctcctcgtcgccggtcaagtcgccggcggccccctacttcctgggtagctctttctcgccggtgcgctgcggcggcccaggagatgcgtcgccgcggggttgcggggcgcgccgggcgggcgaaggccgccgctcgccgcggccggaccacccgggcaccccgccacacaagaccttccgcaagctgcgactcttcgacaccccgcacacgcccaagagtttgctctccaaagctcggggaattgattccagctctgttaaactccggggtagttctctcttcatggatacagaaaaatcaggaaaaagggaatttgatgtgcgacagactcctcaagtgaatattaatccttttactccggattctttgttgcttcattcctcaggacagtgtcgtcgtagaaagagaacgtattggaatgattcctgtggtgaagacatggaagccagtgattatgagcttgaagatgaaacaagacctgctaagagaattacaattactgaaagcaatatgaagtcccggtatacaacagaatttcatgagctagagaaaatcggctctggagaatttggttctgtatttaagtgtgtgaagaggctggatggatgcatttatgccattaagcgatcaaaaaagccattggcgggctctgttgatgagcagaacgctttgagagaagtatatgctcatgcagtgcttggacagcattctcatgtagttcgatatttctctgcgtgggcagaagatgatcatatgcttatacagaatgaatattgtaatggtggaagtttagctgatgctataagtgaaaactacagaatcatgagttactttaaagaagcagagttgaaggatctccttttgcaagttggccgaggcttgaggtatattcattcaatgtctttggttcacatggatataaaacctagtaatattttcatatctcgaacctcaatcccaaatgctgcctctgaagaaggagacgaagatgattgggcatccaacaaagttatgtttaaaataggtgatcttgggcatgtaacaaggatctccagtccacaagttgaggagggcgatagtcgttttcttgcaaatgaagttttacaggagaattatacccatctaccaaaagcagatatttttgcgcttgccctcacagtggtatgtgctgctggtgctgaacctcttccgagaaatggagatcaatggcatgaaatcagacagggtagattacctcggataccacaagtgctttcccaagaatttacagagttgctaaaagttatgattcatccagatccagagagaagaccttcagcaatggcactggtaaagcattcagtattgctgtccgcttctagaaagagtgcagaacaattacgaatagaattgaatgccgaaaagttcaaaaattcacttttacaaaaagaactcaagaaagcacagatggcaaaagctgcagctgaggaaagagcactcttcactgaccggatggccactaggtccaccacccagagtaatagaacatctcgacttattggaaagaaaatgaaccgctctgtcagccttactatatactgagctactcctttcccacctccccctgaacactgtgacaagaggaagctaggttgaaatcactgatagaatccagtttgcaattactttctcgattggtgtcagtagttttactgattaggacttttattgtgaattacagttgaaagctgtattttgatgattgctatgtcaggctttcatctaatcttaccagtctgtcttctgtaggatgtgtcactgttggatgttacaccagcctttccagggttaaccactgtggtggtgtgctgcttatagtttgctgttgcattgtaataaaaggtgtctttccctgtagtgacctgtaaaaagtactcaagggctttattacagacataccctccctttgaaaagggacatgctaaaagactcattactactcagccttcaatgtacctgtgtgtccatcttatatttcttttttttttaattgtgaattagacttgtatatcccactgggagcactttgtaggcattgcatgaaccatgggatgatgattctgtggaggtattgccttgtgaatttgctgctattttagttttgtctttgctgtaaacttgtagcattaaacaatcattgttgttaataggtcttctttttgaaacaattatgtgaaatgtatagctgcttttgatggaaagcagctatttgcctttttttttttcctttgaactttgaagctagtgcattggaaaaatgcaccctttccctcctttggaatgctgtattaatgtagtataataattactggttttgtaacttgttctggtaatgtccttcccggactctttttaaatgtctccccctaagttttatacttgattgtattattagtctgtttttaaatgttttgcccggtttttctcttcaatatttgtgtatataaaccgatcttcgtgatactgtacatagctgtttgaaatgccagaatgacttctgacattccaagtttttcacaaaatatattttatctgtgattagccatttgactaataatactggctaacagatgttgaaaaaaattgtctgttttctcattaattttggtctaaaacatgtttgcacttgtctttgacttgtgttttattaacattgattggcatattaaaagtcactctgagctt

SEQ ID NO: 826 - protein, 646 aa, Homo sapien [sequence omitted]

SEQ ID NO: 827 - DNA, 11043 bp, Homo sapien
  Unsure 6964-6995: Unknown base
ttgctgcgtcaactgtgttccctttggcctggctgagtttgatactgtggggattcagtttaggcgctggcccgaggatatcccagcggtggtacttcggagacacctgtctgcatctgactgagccggctctcctggcctcgcgctgcacattctctcctggcggcggcgccacctgcagtagcgttcgcccgaacatggcgacacggagcagcaggagggagtcgcgactcccgttcctattcaccctggtcgcactgctgccgcccggagctctctgcgaagtctggacgcagaggctgcacggcggcagcgcgcccttgccccaggaccggggcttcctcgtggtgcagggcgacccgcgcgagctgcggctgtgggcgcgcggggatgccaggggggcgagccgcgcggacgagaagccgctccggaggaaacggagcgctgccctgcagcccgagcccatcaaggtgtacggacaggttagtctgaatgattcccacaatcagatggtggtgcactgggctggagagaaaagcaacgtgatcgtggccttggcccgagatagcctggcattggcgaggcccaagagcagtgatgtgtacgtgtcttacgactatggaaaatcattcaagaaaatttcagacaagttaaactttggcttgggaaataggagtgaagctgttatcgcccagttctaccacagccctgcggacaacaagcggtacatctttgcagacgcttatgcccagtacctctggatcacgtttgacttctgcaacactcttcaaggcttttccatcccatttcgggcagctgatctcctcctacacagtaaggcctccaaccttctcttgggctttgacaggtcccaccccaacaagcagctgtggaagtcagatgactttggccagacctggatcatgattcaggaacatgtcaagtccttttcttggggaattgatccctatgacaaaccaaataccatctacattgaacgacacgaaccctctggctactccactgtcttccgaagtacagatttcttccagtcccgggaaaaccaggaagtgatccttgaggaagtgagagattttcagcttcgggacaagtacatgtttgctacaaaggtggtgcatctcttgggcagtgaacagcagtcttctgtccagctctgggtctcctttggccggaagcccatgagagcagcccagtttgtcacaagacatcctattaatgaatattacatcgcagatgcctccgaggaccaggtgtttgtgtgtgtcagccacagtaacaaccgcaccaatttatacatctcagaggcagaggggctgaagttctccctgtccttggagaacgtgctctattacagcccaggaggggccggcagtgacaccttggtgaggtattttgcaaatgaaccatttgctgacttccaccgagtggaaggattgcaaggagtctacattgctactctgattaatggttctatgaatgaggagaacatgagatcggtcatcacctttgacaaagggggaacctgggagtttcttcaggctccagccttcacgggatatggagagaaaatcaattgtgagctttcccagggctgttcccttcatctggctcagcgcctcagtcagctcctcaacctccagctccggagaatgcccatcctgtccaaggagtcggctccaggcctcatcatcgccactggctcagtgggaaagaacttggctagcaagacaaacgtgtacatctctagcagtgctggagccaggtggcgagaggcacttcctggacctcactactacacatggggagaccacggcggaatcatcacggccattgcccagggcatggaaaccaacgagctaaaatacagtaccaatgaaggggagacctggaaaacattcatcttctctgagaagccagtgtttgtgtatggcctcctcacagaacctggggagaagagcactgtcttcaccatctttggctcgaacaaagagaatgtccacagctggctgatcctccaggtcaatgccacggatgccttgggagttccctgcacagagaatgactacaagctgtggtcaccatctgatgagcgggggaatgagtgtttgctgggacacaagactgttttcaaacggcggaccccccatgccacatgcttcaatggagaggactttgacaggccggtggtcgtgtccaactgctcctgcacccgggaggactatgagtgtgacttcggtttcaagatgagtgaagatttgtcattagaggtttgtgttccagatccggaattttctggaaagtcatactcccctcctgtgccttgccctgtgggttctacttacaggagaacgagaggctaccggaagatttctggggacacttgtagcggaggagatgttgaagcgcgactggaaggagagctggtcccctgtcccctggcagaagagaacgagttcattctgtatgctgtgaggaaatccatctaccgctatgacctggcctcgggagccaccgagcagttgcctctcaccgggctacgggcagcagtggccctggactttgactatgagcacaactgtttgtattggtccgacctggccttggacgtcatccagcgcctctgtttgaatggaagcacagggcaagaggtgatcatcaattctggcctggagacagtagaagctttggcttttgaacccctcagccagctgctttactgggtagatgcaggcttcaaaaagattgaggtagctaatccagatggcgacttccgactcacaatcgtcaattcctctgtgcttgatcgtcccagggctctggtcctcgtgccccaagagggggtgatgttctggacagactggggagacctgaagcctgggatttatcggagcaatatggatggttctgctgcctatcacctggtgtctgaggatgtgaagtggcccaatggcatctctgtggacgaccagtggatttactggacggatgcctacctggagtgcatagagcggatcacgttcagtggccagcagcgctctgtcattctggacaacctcccgcacccctatgccattgctgtctttaagaatgaaatctactgggatgactggtcacagctcagcatattccgagcttccaaatacagtgggtcccagatggagattctggcaaaccagctcacggggctcatggacatgaagattttctacaaggggaagaacactggaagcaatgcctgtgtgcccaggccatgcagcctgctgtgcctgcccaaggccaacaacagtagaagctgcaggtgtccagaggatgtgtccagcagtgtgcttccatcaggggacctgatgtgtgactgccctcagggctatcagctcaagaacaatacctgtgtcaaagaagagaacacctgtcttcgcaaccagtatcgctgcagcaacgggaactgtatcaacagcatttggtggtgtgactttgacaacgactgtggagacatgagcgatgagagaaactgccctaccaccatctgtgacctggacacccagtttcgttgccaggagtctgggacttgtatcccactgtcctataaatgtgaccttgaggatgactgtggagacaacagtgatgaaagtcattgtgaaatgcaccagtgccggagtgacgagtacaactgcagttccggcatgtgcatccgctcctcctgggtatgtgacggggacaacgactgcagggactggtctgatgaagccaactgtaccgccatctatcacacctgtgaggcctccaacttccagtgccgaaacgggcactgcatcccccagcggtgggcgtgtgacggggatacggactgccaggatggttccgatgaggatccagtcaactgtgagaagaagtgcaatggattccgctgcccaaacggcacttgcatcccatccagcaaacattgtgatggtctgcgtgattgctctgatggctccgatgaacagcactgcgagcccctctgtacgcacttcatggactttgtgtgtaagaaccgccagcagtgcctgttccactccatggtctgtgacggaatcatccagtgccgcgacgggtccgatgaggatgcggcgtttgcaggatgctcccaagatcctgagttccacaaggtatgtgatgagttcggtttccagtgtcagaatggagtgtgcatcagtttgatttggaagtgcgacgggatggatgattgcggcgattattctgatgaagccaactgcgaaaaccccacagaagccccaaactgctcccgctacttccagtttcggtgtgagaatggccactgcatccccaacagatggaaatgtgacagggagaacgactgtggggactggtctgatgagaaggattgtggagattcacatattcttcccttctcgactcctgggccctccacgtgtctgcccaattactaccgctgcagcagtgggacctgcgtgatggacacctgggtgtgcgacgggtaccgagattgtgcagatggctctgacgaggaagcctgccccttgcttgcaaacgtcactgctgcctccactcccacccaacttgggcgatgtgaccgatttgagttcgaatgccaccaaccgaagacgtgtattcccaactggaagcgctgtgacggccaccaagattgccaggatggccgggacgaggccaattgccccacacacagcaccttgacttgcatgagcagggagttccagtgcgaggacggggaggcctgcattgtgctctcggagcgctgcgacggcttcctggactgctcggacgagagcgatgaaaaggcctgcagtgatgagttgactgtgtacaaagtacagaatcttcagtggacagctgacttctctggggatgtgactttgacctggatgaggcccaaaaaaatgccctctgcatcttgtgtatataatgtctactacagggtggttggagagagcatatggaagactctggagacccacagcaataagacaaacactgtattaaaagtcttgaaaccagataccacgtatcaggttaaagtacaggttcagtgtctcagcaaggcacacaacaccaatgactttgtgaccctgaggaccccagagggattgccagatgcccctcgaaatctccagctgtcactccccagggaagcagaaggtgtgattgtaggccactgggctcctcccatccacacccatggcctcatccgtgagtacattgtagaatacagcaggagtggttccaagatgtgggcctcccagagggctgctagtaactttacagaaatcaagaacttattggtcaacactctatacaccgtcagagtggctgcggtgactagtcgtggaataggaaactggagcgattctaaatccattaccaccataaaaggaaaagtgatcccaccaccagatatccacattgacagctatggtgaaaattatctaagcttcaccctgaccatggagagtgatatcaaggtgaatggctatgtggtgaaccttttctgggcatttgacacccacaagcaagagaggagaactttgaacttccgaggaagcatattgtcacacaaagttggcaatctgacagctcatacatcctatgagatttctgcctgggccaagactgacttgggggatagccctctggcatttgagcatgttatgaccagaggggttcgcccacctgcacctagcctcaaggccaaagccatcaaccagactgcagtggaatgtacctggaccggcccccggaatgtggtttatggtattttctatgccacgtcctttcttgacctctatcgcaacccgaagagcttgactacttcactccacaacaagacggtcattgtcagtaaggatgagcagtatttgtttctggtccgtgtagtggtaccctaccaggggccatcctctgactacgttgtagtgaagatgatcccggacagcaggcttccaccccgtcacctgcatgtggttcatacgggcaaaacctccgtggtcatcaagtgggaatcaccgtatgactctcctgaccaggacttgttgtatgcaattgcagtcaaagatctcataagaaagactgacaggagctacaaagtaaaatcccgtaacagcactgtggaatacacccttaacaagttggagcctggcgggaaataccacatcattgtccaactggggaacatgagcaaagattccagcataaaaattaccacagtttcattatcagcacctgatgccttaaaaatcataacagaaaatgatcatgttcttctgttttggaaaagcctggctttaaaggaaaagcattttaatgaaagcaggggctatgagatacacatgtttgatagtgccatgaatatcacagcttaccttgggaatactactgacaatttctttaaaatttccaacctgaagatgggtcataattacacgttcaccgtccaagcaagatgcctttttggcaaccagatctgtggggagcctgccatcctgctgtacgatgagctggggtctggtgcagatgcatctgcaacgcaggctgccagatctacggatgttgctgctgtggtggtgcccatcttattcctgatactgctgagcctgggggtggggtttgccatcctgtacacgaagcaccggaggctgcagagcagcttcaccgccttcgccaacagccactacagctccaggctggggtccgcaatcttctcctctggggatgacctgggggaagatgatgaagatgcccctatgataactggattttcagatgacgtccccatggtgatagcctgaaagagctttcctcactagaaaccaaatggtgtaaatattttatttgataaagatagttgatggtttattttaaaagatgcactttgagttgcaatatgttatttttatatgggccaaaaacnnnnnnnnnnnnnnnnnnnnnnnnnnnnnnnnggaatgaataaactttgtagtaatcaactgtgaacttcaaaccaggttgattttagtaacccaattgctttgatttgacattaatgtagtcttacagggctgtgcttgctgggcatgcttttacgtctgtgagataatttcggttcagtaaattggccaatctttttatttttctaagacacagaaatgtatttaataaaaacctcgagagagtgatgggtggaaccccttctccttgaaagtgtgtacagatattccattttgtttggatatagtttataggaaagtgtgtggatgtattatggcggaaggtttctttatgttattttgttaatttattgggactctgtgtaaggccaggctttagtggtcattagacaccacatgtgttatgagccccttacccatagggttgggggtgggaagagaagcatatttttttgccattccggaagcaatccatttttattcacttgtgtgtcatgtaatggtctttggcaggagagagcactgagtcattgctggagttcagttcaacagagctgcagcttgggaagccctgtaagcccacagcttcctctcttatattaattgatggaattttactgtatgtgcctctgtacaagatgtagctttgagagctacaaaatgataacactgctttattacacactggtttcattgtcattgcaaaaacttaccctggttgtgggggagagttctagatctgtgccatgatccatacactggctaatagagtacataatttttccattttccattttttgtttttacttactactgaaggatctcagatgtaaaattatgtatttggtttgagatggccacttattgtccttaaaaatccatactgatatatgcagtcattttgaattggacagtgccttctctttttttttctcctcttcttccatctccctcacccatgcccccacccaatctaaagagacagtgctgtacattctcatagagatagagaagatctaaaaagttgagactactcaatccagttaacaacagcaggagcactagagtttgttcatttattctctctgtaaaacaagctgtgctttttttcttctgcctttaaaatgccacccgtgtattcaaaccatggccacttgatacttatgtagaatccatcgtgggctgatgcaagccctttatttaggcttagtgttgtgggcaccaatgtcgagcatcgttgtgacttgtgctgtatgattctcactgaagaatttcctttcagccaagaagcagtgaggtctgggaatattccaaagtcatgtctctgaatatgtgtccttgacgtgcaagctttgtaaaaccccatccccgcttaggtgcgaggcatcaccttctcacaagtgtttagtttcttttaaccacaagtatcattcttgggtgataatatagtttcattctacttagggattgtttagaaaacaaagaaagagccaattaaattttttagtttttgaaatttttatttatatgtatacttagatgagtattttaagctgtcgacctttagtttgccatacgggtaggactgtatttcatgttaacaactggtggtaatgataagccttcttctagcgtattttctcttctttcctgtcactttcctaagtttttttttttaaagactggaattttttttggctttatcttgtcttaccgtagagatttgttcaaaactctaagccctaccacctcccctttaataagctctttaaatagttgaatcattaacaacctggtgggaggcaagtcatttaattgaaccactaggaagtgtattttcttttctttttctgccaactttttggtggcatttgtaaaagctgatataaaaggctctgagatgttattttcagttattccataggcaagcctttttacagagcatatgtctccagttggcagcttgagatatttccgagcatccggttctagctaccagtgcctcccaatgcttagtgcacagtactgtagactggccatcacccctctccttggaaaatgccactgtgctgtttgaaaaaaagcagccttttagggctagagtattttatataaacagaagagctaagttcctgaagactaagctagatagctgcagctatatgtaaattgtatatttttatgaacttttgaagcacacactcctgtttccctctgtgtagctttgtggggatttcatgtatatatgctgtctgaaagaatccagaggttggagtgccaatagaaaatgaaaacaaatgccttgtactacaggcagcctctgaaggtgaccacataactgtcttcactgtgaccaatcggagtccctgcttgcttgtgaagaaggggcttttgtaccttgttggagatgccacctcagaagttcacactgtgcaggaaaaaggttttattctctcctggcatacattagaatgtcagatgcctgcatccatgtggaccacgatgggcctctaaaaattggtgggcagggggtttgcttatgagttttctctggaaaccgattttactcctggatgtattgaatgccccttgagctttatgagatacgagtccacatggataaaatgttagagagtggagttctacagaggattccaggaagaggccatgtctgtgcagtcctagttccagacaggtgagaagctccaggaactactggctaccttgacaagctgggtaaatagttatcattctgggtaactggttgaaactctgacttttggacaagtaattcctggggttctgtctttggtagcatcaccagggatatttgggtgggacagacagaagacacacagctgcctgttctctcctgcccatcatgtttggcccactagatgaagctgtactcagcaatttagggaatgtaacccttctcagaactggccattttcaggggaagcttgggagagcaatagtatggtgagccccttagagatgagcgcctactccttcttggcgaatgctgccttcagatgcttaccaagtggtcactgcatctagtaagattatatttccagtacacttccttagggcagaaacaccatcctatcaggtttggtcagtcccttcttcatgaagggagtcatggggaattcctgaaaattttcttccttctgcagacagttggatgagtcccttagagaaggcatccagagacataactaaactgaatatcatcccatattgattttaggaattgactctaaaactctgtgcagaatcttgtgttgggattgtatcttgacattcctgttgtgttatttttcttaactggagtgtgtgctgcctttcaggtacaatttttgtgtaataaaagccagtgcattaagtttatatagactactttctatgcaagactgagatatggaatagataggaagagatatgtactgctgggtacatggacagtaagtgtgttttcagatggagtaccagcaccgaaaatgggttgagggaggatgggttgtatgtatgtttctgcccactaattttgagcagccatattatgaattaaatcgtcacagccaagtaataacccaagaatggtatgagtttcatgtgtaatagctcaaatggaataagcatgaatgctggagtggaccattatcctcaaatattctatgtcacttctcatttaaagactcttgttatgaactattagaaactttaggcaaaatcaaaagtatttgcggcaaaataaaggcctattctactcttatttaaagtgaaacactgtatacttgtttctctccaaagcgaaattaagtatttataatttcaattgcctcgataagtttccaagtcactgaaatctgctgaaggttttactgtattgttgcacaactttaagataatttttgtctcaatgtcaacttttttcactgaataaaaatttaactgggtcaagaaaacacctctttgaaaatccactgtctctgtgtgtctcgagctgttctttagagcgcaataaagatggctgacgcagtctccaaacccc

SEQ ID NO: 828 - protein, 2279 aa, Homo sapien [sequence omitted]

SEQ ID NO: 829 - DNA, 2340 bp, Homo sapien
aggcgctgcggagacgcgtagaggagcgcgccccccggccgmtgccgmccctggcccgtgccgtcaccccgcttctccgcgcctcgggcggtacccagccagtccccagcgccgcgctaccgcgctgaccggccctccagacgcctcccggtacccgggaccccagcccggccgctcgcccgcagcccgccggccgcacacgtccccggagccgggcctagggcgggcggcagggcggctcggcgcagtcaggctgggctctgtagcgtccccatggccgcggccggctggcgggacggctccggccaggagaagtaccggctcgtggtggtcggcgggggcggcgtgggcaagtcggcgctcaccatccagttcatccagtcctattttgtaacggattatgatccaaccattgaagattcttacacaaagcagtgtgtgatagatgacagagcagcccggctagatattttggatacagcaggacaagaagagtttggagccatgagagaacagtatatgaggactggcgaaggcttcctgttggtcttttcagtcacagatagaggcagttttgaagaaatctataagtttcaaagacagattctcagagtaaaggatcgtgatgagttcccaatgattttaattggtaataaagcagatctggatcatcaaagacaggtaacacaggaagaaggacaacagttagcacggcagcttaaggtaacatacatggaggcatcagcaaagattaggatgaatgtagatcaagctttccatgaacttgtccgggttatcaggaaatttcaagagcaggaatgtcctccttcaccagaaccaacacggaaagaaaaagacaagaaaggctgccattgtgtcattttctagaatcccttcagttttagctaccaacggccaggaaaagccctcatcttctctttctctcctcagtttacatcttgttggtacctttctagccttagacaaatgatcaccatgttagccttagacgaagaagctggctagtcctttctgtgaagctaatacaatggtcatttccagacaaatttaaaggaaacactaaggctgcttcaaagattatctgattcctttaaaatatatgtctatatacacagacatgctctttttttaagtgcttacattttaatagagatgaatcagttttggaatctaagctgtttgccaagctgaagctacaggttgtgaaataatttttaacttttggaatcatactgcctactgttactctaaatagaaatatagggttttttttaatgtgaatttttgcctatctttaaacatttcaatgtcagcctttgttaaccttaaatacactgaattgaatctacaaaagtgaaccatctcagacctttactgatactacaacttttgttttctgatggccaaaataccaaatgcctgttgtatttatggattaaaaactgcttataaaaccctgtgttactactcctactcttggagatgataatattctatgtggtcaaatatttggactcatttaggacttagatatttcagtgtacttgattttttaatttaactctttttcacagccacgctaagggtaaaaaggaataatttccttctgtcttccttttcaagtatttctgggtaagggattcaaaaaactaaaactgtttttgtttgtaatataaaatatggaattgatctttccagggtcagagatgattaatgtttttgctatatacttttatacattattttcttatcaaactagttaacaagtatttttatatgtttgtaagcagatatgctttcatagcataccttgtgtatatgtaaagataagtatttaattctcactgttcacttttaactgacaaagaaaaacaagtggaaactacagaaactgtggtagaacttttacttgctggtctggtcttggttgtacccatctttggccagtcacataactactcaagaaaccttcccaatagagtacaacaggatgagactctgaaatcactttcagtattccctgctagatattgattgttatttcaagtattaagtgtaagcttttaatggataattagtataactgtggatggcatctgattttgtttttaattctgtggattgtgtttaagcaattcaatagtatgttcctgattttgagatgctaagtggtattgcacagttgtcactttatcaagtgtgtacaacagtcccatgaagtttatagagcatacccttgtatagcttcaggtgctagaattaaaattgatctgttatcacaaaaaaaaaaaaaaaaaaaaaaggctctttaattaggcg

SEQ ID NO: 830 - DNA, 1410 bp, Homo sapien; identical to SEQ ID NO: 567

SEQ ID NO: 831 - protein, 204 aa, Homo sapien; identical to SEQ ID NO: 568

SEQ ID NO: 832 - DNA, 573 bp, Homo sapien
ttaagcacttgttttgggtacaaggcatttctgacattttataaacctacatttaaggggaatttttaaaggaaatgttttttcttttttttttgtttttcgagggggcaaggagggacagaaaagtaacctcttcttaagtggaatattctaataagctaccttttgtaagtgccatgtttattatctaatcattccaagttttgcattgatgtctgactgccactcctttctttcaaggacagtgttttttgtagtaaaatcactggtttatacaaagctttatttagggggtaaagttaagctgctaaaaccccatgttggctgctgctgttgagatactgtgctttgggagtaaaaaaagaaagttatttctttgtcttaaagaatttttaaaaaattagtcatgagacttattcatctttccagggaacatactgattggtcttaaaagactagacagttaagtaaaaggtggctggaacatctatttttctacaaaactggaaaaatgaacctggttctagaagaatgtacaccaaaataaaacatgtgaagcagtattgattcttt

SEQ ID NO: 833 - protein, 22 aa, Homo sapien
LSTCFGYKAFLTFYKPTFKGNF

SEQ ID NO: 834 - DNA, 761 bp, Homo sapien
  Unsure 698: Unknown base
  Unsure 717: Unknown base
  Unsure 731: Unknown base
gcacgagcatagacttttaaactggtacggttcttagagatggtccttggccttctgttgttgttgtkgtttttttctttttcttcttctccttctccttcttcttctcttctccttctttcttcttttttttttcagagtcttgctctgtcaccaagactggagtgaagtgatgtgatctcggcttactgcaacctgggaggcagaggttgcagtgagtcgagatggtgccattgctctcgtttgggcaacaagagtgaaactcttgtctcaaaaaaaaaaaaaaaatgaggtttaagacagttttgtcattactggtgggatctggtcacacaagatagcattaaacgtgacatggcacataaaattggttaaaaaattttgttttttaattacgtaatgtaaaagcccaacaaacactttatgcaagattggaatgtatcttcaaattcagatttaataaacatgtaaagatcctctgtatataaaagttgtatttaatcccttgtgccccaagaatgctataaaagatcccaagaatgttatctatgaaaagatagcaatagggaatggtgaacaaataatttaatttgccaattctaaaaaacatggacttaaaccccatgaaaacttggttccatagttttaactgttttatggttccaatacaaaaccagagtggtttacattccacaatnaccaaatttgcatccaatnttggggtaattttnggtatttgccatgggatactattcattttt

SEQ ID NO: 835 - protein, 42 aa, Homo sapien
  unsure 10: unknown amino acid
MVLGLLLLLXFFSFSSSPSPSSSLLLLSSFFFQSLALSPRLE

SEQ ID NO: 836 - DNA, 1596 bp, Homo sapien; identical to SEQ ID NO: 66

SEQ ID NO: 837 - protein, 451 aa, Homo sapien; identical to SEQ ID NO: 67

SEQ ID NO: 838 - DNA, 939 bp, Homo sapien
gggcttcctggggagggtgtggcagggtggtgggcatcccctccctcaccaaagcatgggctctttgtttcctctttgccaggcctgggtccttcccagtgacccctcagccttcacttcctcctcactcccggggagctgtgacaggtgtttgggggaggggaggggggtatgataagctgggacagctgcacccaccggtgctctggtgagatggggggcccggatgttggggagacacatctgctgggttcccagcccaaggtccccaaccctggctgtctggccttgtctgtcaccccccgtgcccactggcagggacaggaagctccccccccaccccgctttgggcagtttgccttggcacgggcctgatctgttttcctccccagagcagctgctgttctgtctgctgggcagagggctgggttcctccgaggtaggcaggggcctcaacccagagcccctctcacaccctctttcaactcaggcttatgtctctccctcctcccccacccccaccccaggaagaggagatcccagaactggagattgacgtggatgagctcctggacatggagagtgacgatgcccgggctgccagggtcaaggagctgctggttgactgttacaaacccacagaggccttcatttctggcctgctggacaagatccggggcatgcagaagctgagcacaccccagaagaagtgagggtccccgacccaggagaacggtggctcccacaggacaatcgctgccccccaacctcgtagcaacagcaataccgggggaccctgcggccaggcctggtgccatgagcagggctcctcgtgcccctggcccaggggtctcttcccctgccccctcagttttccacttttggggttttttattgttattaaactgatgggactttaaaaaaaaaaaaaaaaaaaaa

SEQ ID NO: 839 - protein, 109 aa, Homo sapien
MLGRHICWVPSPRSPTLAVWPCLSPPVPTGRDRKLPPHPALGSLPWHGPDLFSSPEQLLFCLLGRGLGSSEVGRGLNPEPLSHPLSTQAYVSPSSPTPTPGRGDPRTGD

SEQ ID NO: 840 - DNA, 4666 bp, Homo sapien
aagtcagcgctggagtcggctaggcggctggaaacggcggctgccgccggtgactcagggaggcgggaggcgggggaggagctcttcctgcaggcgtggaaaccatggtgctcacgctcggagaaagttggccggtattggtggggaggaggtttctcagtctgtccgcagccgacggcagcgatggcagccacgacagctgggacgtggagcgcgtcgccgagtggccctggctctccgggaccattcgagctgtttcccacaccgacgttaccaagaaggatctgaaggtgtgtgtggaatttgatggggaatcttggaggaaaagaagatggatagaagtctacagccttctaaggagagcatttttagtagaacataatttggttttagctgaacgaaagtcacctgaaatttctgaacgaattgtacagtggcctgcaataacgtacaaacctctgttggacaaagctggtttgggatccataacttctgttcgctttctgggagatcaacaaagagtatttctttctaaagaccttttgaagcctatacaggatgtaaacagtcttcgactttctcttacggataatcagattgtcagtaaagaatttcaagctttgattgtgaagcatttagatgaaagccatcttttaaaaggtgacaaaaacttagttggttcagaagtaaaaatttatagcttggacccatctactcagtggttttcagcaaccgttataaatggaaacccagcatcaaaaactcttcaagtcaactgtgaggagattccagcactgaaaattgttgatccgtcactgattcatgttgaagttgtacacgataaccttgtgacatgtggtaattctgcaagaattggagctgtaaaacgcaagtcttctgagaataatggaaccctggtttccaaacaagcaaaatcttgctctgaggcctctcccagtatgtgtcctgtgcagtctgtacctacaacagtttttaaggagatactgcttggctgtactgcggcaactccacctagtaaggacccaagacagcaaagtactccccaggctgccaactctccacctaaccttggagcaaaaattcctcaaggatgtcataaacaaagtttaccagaggaaatttcttcctgtctaaatacaaagtctgaagctctgagaacaaaaccagatgtctgcaaagcagggttgctctcaaagtcctctcagattggaactggagacttgaaaattctgactgagccaaaaggcagctgtactcagcctaagacaaacactgatcaggaaaacagattggagtctgttccacaagcattgactggccttcctaaggagtgcttacctacaaaggcttcttctaaggcagaattggaaattgccaatcctcctgaactgcagaagcacctagaacatgcaccttccccatcggatgtttcaaatgcaccagaagtgaaagcaggtgtcaatagtgatagccctaataactgttcaggaaaaaaggtagaaccttcagctttagcttgccgatcacagaatttaaaggaatcttcagtaaaagtagataatgaaagctgttgttcaagaagcaacaataaaatccagaatgccccatccaggaagtcggttttgacagacccagctaaactcaaaaagctgcaacagagtggcgaggccttcgtacaggatgattcttgtgtgaacatcgtggcacagttgcctaaatgccgagagtgtcgcttggacagtctccgcaaggataaggagcaacagaaggactcacctgtgttttgccgcttctttcacttcaggaggttacaattcaacaaacatggtgtgttgcgggtagaaggcttcttaacaccaaacaagtatgacaatgaagcaattggcttgtggttacctttaaccaaaaacgttgtggggattgatttggacacagcaaagtacatcttggccaacattggagaccacttctgtcaaatggtgatttctgaaaaggaagctatgtcaactattgagccacacagacaggttgcttggaagcgagctgtcaaaggtgttcgagaaatgtgtgatgtgtgcgacaccaccatcttcaacctgcactgggtgtgtcctcggtgtgggtttggagtatgtgtggactgctaccggatgaagagaaagaattgccaacagggtgctgcttacaagactttctcttggctaaaatgtgtgaagagtcagatacatgaaccagagaacttaatgcccacacagatcattcctggaaaagcactctatgatgttggagacattgttcattctgtaagagcgaaatggggaataaaggcaaactgcccttgttcaaacaggcaattcaaactcttttcaaagccagcctcaaaggaagacctaaaacagacttctttagctggagaaaaaccgactcttggtgcagtgctccagcagaatccctcagtgttggagccagcagctgtgggtggggaagcagcctccaagccagccggcagcatgaagcctgcctgtccagccagcacatctcctctaaactggctggccgacctaaccagcgggaatgtcaacaaggaaaacaaggaaaaacaaccaacaatgccaattttaaagaatgaaatcaaatgccttccacccctcccacctttaagcaaatccagcacagtcctccatacgtttaacagcacaattttgacacccgtaagcaacaacaattctggtttcctccggaatctcttgaattcttctacaggaaagacagaaaatggactcaagaatacaccaaaaatccttgatgacatctttgcctctttggtgcaaaataagacgacttctgatttatctaagaggcctcaaggactaaccatcaagcccagcattctgggctttgacactcctcactattggctttgtgataatcgcttgctgtgcttgcaagaccccaacaataagagcaactggaatgtgtttagggagtgctggaaacaagggcagccagtgatggtgtctggagtgcatcataaattgaactctgaactttggaaacctgaatccttcaggaaagagtttggtgagcaggaagtagacctagttaattgtaggaccaatgaaatcatcacaggagccacagtaggagacttctgggatggatttgaagatgttccaaatcgtttgaaaaatgaaaaagaaccaatggtgttgaaacttaaggactggccaccaggagaagattttagagatatgatgccttccaggtttgatgatctgatggccaacattccactgcccgagtacacaaggcgagatggcaaactgaatttggcctctaggctgccaaactactttgttcggccagatctgggccccaagatgtataatgcttatggattaatcactcctgaagatcggaaatatggaacaacaaatcttcacttagatgtatctgatgcagctaatgtcatggtctatgtgggaattcccaaaggacagtgtgagcaagaagaagaagtccttaagaccatccaagatggagattctgacgaactcacaataaagcgatttattgaaggaaaagagaagccaggagcactgtggcacatatatgctgcaaaggacacggagaagataagggaatttcttaaaaaggtatcagaagagcaaggtcaagaaaacccagcagaccacgatcctattcatgatcaaagctggtatttagaccgatcattaagaaaacgtcttcatcaagagtatggagttcaaggctgggctattgtacagtttcttggggatgtggtgtttatcccggcaggagctccacatcaggttcataacttatatagctgcatcaaagtggctgaagattttgtttctccagagcatgttaaacactgcttctggcttactcaggaattccgatatctgtcacagactcataccaatcacgaagataaattacaggtgaagaatgttatctaccatgcagtgaaagatgcagttgctatgctgaaagccagtgaatccagttttggcaaaccttaatctccctgcacattggaaatgaattacaggcagctgttcaaactcttcaggcaggattcctgtggactttgagattcatgttacctcatcttcttttttaaactgtacccaacttgtgagggtactctgtctaatgtatatttctagtgtttacagacagtaaatgtgtatatgtagtaactatttacagaacatgcatccttaaactgtgacttctcacctagtgcagaacttttaccaggctgtaaaagcaaaacctcgtatcagctctggaacaatacctgcagttattcttcagctgtttggacaacttagattgggtttataactattaggaatcactgcacagtttatttgggttgtgttttgtgtctgagtcccctccctcatcccttagggtccagaagagcaatggaggaagtgacagctaatgttgcagttcttattgtatggcataggactggcattatatagcagaaatcaactactgtacaatttcttggggttaaccatctttagttaaatggaattttaatttaaatgacgctttgctaattttaagtgttaagcattttgcattaaaatattcatataat

SEQ ID NO: 841 - protein, 1321 aa, Homo sapien
MVLTLGESWPVLVGRRFLSLSAADGSDGSHDSWDVERVAEWPWLSGTIRAVSHTDVTKKDLKVCVEFDGESWRKRRWIEVYSLLRRAFLVEHNLVLAERKSPEISERIVQWPAITYKPLLDKAGLGSITSVRFLGDQQRVFLSKDLLKPIQDVNSLRLSLTDNQIVSKEFQALIVKHLDESHLLKGDKNLVGSEVKIYSLDPSTQWFSATVINGNPASKTLQVNCEEIPALKIVDPSLIHVEVVHDNLVTCGNSARIGAVKRKSSENNGTLVSKQAKSCSEASPSMCPVQSVPTTVFKEILLGCTAATPPSKDPRQQSTPQAANSPPNLGAKIPQGCHKQSLPEEISSCLNTKSEALRTKPDVCKAGLLSKSSQIGTGDLKILTEPKGSCTQPKTNTDQENRLESVPQALTGLPKECLPTKASSKAELEIANPPELQKHLEHAPSPSDVSNAPEVKAGVNSDSPNNCSGKKVEPSALACRSQNLKESSVKVDNESCCSRSNNKIQNAPSRKSVLTDPAKLKKLQQSGEAFVQDDSCVNIVAQLPKCRECRLDSLRKDKEQQKDSPVFCRFFHFRRLQFNKHGVLRVEGFLTPNKYDNEAIGLWLPLTKNVVGIDLDTAKYILANIGDHFCQMVISEKEAMSTIEPHRQVAWKRAVKGVREMCDVCDTTIFNLHWVCPRCGFGVCVDCYRMKRKNCQQGAAYKTFSWLKCVKSQIHEPENLMPTQIIPGKALYDVGDIVHSVRAKWGIKANCPCSNRQFKLFSKPASKEDLKQTSLAGEKPTLGAVLQQNPSVLEPAAVGGEAASKPAGSMKPACPASTSPLNWLADLTSGNVNKENKEKQPTMPILKNEIKCLPPLPPLSKSSTVLHTFNSTILTPVSNNNSGFLRNLLNSSTGKTENGLKNTPKILDDIFASLVQNKTTSDLSKRPQGLTIKPSILGFDTPHYWLCDNRLLCLQDPNNKSNWNVFRECWKQGQPVMVSGVHHKLNSELWKPESFRKEFGEQEVDLVNCRTNEIITGATVGDFWDGFEDVPNRLKNEKEPMVLKLKDWPPGEDFRDMMPSRFDDLMANIPLPEYTRRDGKLNLASRLPNYFVRPDLGPKMYNAYGLITPEDRKYGTTNLHLDVSDAANVMVYVGIPKGQCEQEEEVLKTIQDGDSDELTIKRFIEGKEKPGALWHIYAAKDTEKIREFLKKVSEEQGQENPADHDPIHDQSWYLDRSLRKRLHQEYGVQGWAIVQFLGDVVFIPAGAPHQVHNLYSCIKVAEDFVSPEHVKHCFWLTQEFRYLSQTHTNHEDKLQVKNVIYHAVKDAVAMLKASESSFGKP

SEQ ID NO: 842 - DNA, 250 bp, Homo sapien
  Unsure 34: Unknown base
ctaacccagtatgttcttcttttttatgtaaggnacagctttctccacagagtcctttctgctggtgaggacagcatttctgagcagggctttgttctctatgtgcattaggacttttatcatgcccttgttctgtgtgtagttacttgacagcatcaaatgccgcctcttcctaatgtccttcaagttttcatgaactagcaaccccaccttccaccatggttctgggcgcctgattttgctgtgactc

SEQ ID NO: 843 - DNA, 2463 bp, Homo sapien
gaagggggctgggccggagcccccaggctcagaggaggaggaggaggagcaggaggagagcctggcggtggcggagcagggaaaggggcgcagggagtctgaaagctccaggagcagcagaaggcccagtggccggtctccaaccagtactgagaagcgcatgagcttcgagtccatttcttccctgccagaggttgagccggaccctgaggctgggagtgagcaagaggtattttctgctgtggaagggcccagtgccgaggagacgccttcagacacagaatctccagaagtcctggagacacagcttgatgcccaccagggccttctggggatggaccccccaggtgacatggtggacttcgtggcagctgagagcactgaggaccttaaggccctgagcagcgaggaggaagaagaaatgggaggtgccgcccaggagcctgagagccttctgccaccctctgtgctggaccaggccagcgtcattgcggagcgatttgtcagcagcttctctcggcggagcagcgtggcacaggaggacagcaagtccagtggctttgggagcccgcggctggtcagccggagcagcagcgtgctcagcctggagggcagcgagaagggcctggcccggcatggcagtgccacagactccctcagctgtcagctctccccagaagtggacatcagtgtgggggtggccacagaggacagcccttctgtcaatgggatggagcccccaagcccaggctgcccagtggagcctgaccggtcttcctgcaagaagaaggaatcagcactctccacccgagaccggctgttgctagacaagattaagagctggtggccccactgcacccccgcatcgtgcagctctcccacgtaatggacagccacgtgagcgagcgcgtcaagaacaaggtctaccagctggcccgccagtacagcctccggatcaagagcaacaagccagtgatggccaggccaccactgcagtgggaaaaggtggcccctgagagggatgggaagagccccactgtgccctgtctacaggaagaggctggagagccattaggtggcaaaggtaagaggaagccggtgctgtctctatttgactatgagcagctgatggcccaggagcacagccctcccaagccctcctcggctggggagatgtcaccacagcgtttcttcttcaacccgtctgctgtcagccagaggaccacctcgcctgggggccggccctccgcccggagccccctcagccccacagagaccttcagctggcccgacgtccgtgagctctgctccaagtatgcctcccgcgatgaggcacgccgagcagggggcggccggccccgcggcccacccgtcaacaggagccactcggtgccggagaacatggtagagccacctctgtcgggcagggtgggccgctgccgcagcctgagcaccaagaggggccggggaggcggagaggctgcccaatcccctgggcctctgccccagagcaagccggatggaggcgagaccctgtatgtcactgcagacctcaccctggaggacaaccggcgggtgattgtcatggagaagggaccccttcccagccccactgcagggctggaggagagcagtggccagggaccaagctcaccggtggccctgctggggcaggttcaggacttccagcagtctgcagagtgccagccgaaggaagagggttccagggacccggcagacccgagccagcagggcagagtgagaaaccttagagagaagttccaggccttgaactctgtcggttgatgctgactcctgggggagggaggagtcatgttggaggttggggaagaacctgggcatccttcccctcaagcctgggctcatggagcccctgcccagggccctcaggtgggcggaaagtccatcccctccgcccttcaggaaggatgctcccgtgtgcaggggtctcctgcctgtgccatccactggggctcgagacaatttcccactcacctgtgaggccggtgtggctgcttcccttgtaaatagttgttctctggtaagaagccaaatatttaagctcacttcttcccagagagaggaagctctgctcaggcctccagcgttggctggccatggccacagccagatggaggagcccatccccaggagactcaggcagtggcctggagaggctttgttctgtaacggtgccttttcttagggtccaggcaggaatgaagccaataatttattgctttccattctgtggtatgatgtgcgtgtgcgtgagtgtgtggcccctgtttattcccctcctgtcaagaatgaagtggattcagttcaggtacttttgagggttgttgtgctgaccctgtggttgtcgctgatgtacacacatttcattatttgccaatggtgcaataaccactgctgaccaacaaaaaaaaaaaaaaaaaa

SEQ ID NO: 844 - DNA, 3268 bp, Homo sapien
aatccaactcacctccatgttcaaggatgtccctctgactgcagaagaggtggaatttgtggtggaaaaagcattgagcatgttctccaagatgaatcttcaagaaataccacctttggtctatcagcttctggttctctcctccaagggaagcagaaagagtgttttggaaggaatcatagccttcttcagtgcactagataagcagcacaatgaggaacagagtggtgacgagctattggatgttgtcactgtgccatcaggtgaacttcgtcatgtggaaggcaccattattctacacattgtgtttgccatcaaattggactatgaactaggcagagaactcgtgaaacacttaaaggtaggacagcaaggagattccaataataacttaagtcccttcagcattgctcttcttctgtctgtaacaagaatacaaagatttcaggaccaggtgcttgatcttttaaagacttcggttgtaaagagctttaaggatcttcaactcctccaaggctcaaaatttcttcagaatctagttcctcatagatcttatgtttcaaccatgatcttggaagtagtgaagaatagcgttcatagctgggaccatgttactcagggcctcgtagaacttggtttcattttgatggattcatatgggccaaagaaggttcttgatggaaaaactattgaaaccagcccaagtctttctagaatgccaaaccagcatgcatgtaagctcggagctaatatcctgttggaaacttttaagatccatgagatgatcagacaagaaattttggagcaggtcctcaacagggttgttaccagagcatcttctcccatcagtcatttcttagacctgctttcaaatatcgtcatgtatgcacccttagttcttcaaagttgttcttctaaagtcacagaagcttttgactatttgtcctttctgccccttcagactgtacaaaggctgcttaaggcagtgcagccccttctcaaagtcagcatgtcaatgagagactgcttgatacttgtccttcggaaagctatgtttgccaaccagcttgatgcccgaaaatctgcagttgctgggtttttgctgctcctgaagaactttaaagttttaggcagcctgtcatcctctcagtgcagtcagtctctcagtgtcagtcaggttcatgtggatgttcacagccattacaattctgtcgccaatgaaactttttgccttgagatcatggatagtttgaggagatgcttaagccagcaagctgatgttcgactcacgctttatgaggggttttatgatgttcttcgaaggaactctcagctggctaattcagtcatgcaaactctgctctcacagttaaaacagttctatgagccaaaacctgatctgctgcctcctctgaaattagaagcttgtattctgacccaaggagataagatctctctacaagaaccactggattatctgctgtgttgtattcagcattgtttggcctggtataagaatacagtcatacccttacagcagggagaggaggaagaggaggaggaagaggcattctacgaagacctagatgatatattggagtccattactaatagaatgattaagagtgagctggaagactttgaactggataaatcagcagatttttctcagagcaccagtattggcataaaaaataatatctctgcttttcttgtgatgggagtttgtgaggttttaatagaatacaatttctccataagtagtttcagtaagaataggtttgaggacattctgagcttatttatgtgttacaaaaaactctctgacattcttaatgaaaaagcgggtaaagccaaaactaaaatggccaacaagacaagtgatagtcttttgtccatgaaatttgtgtccagtcttctcactgctcttttcagagtcttgctatggagatacacttcaattcctacttcagtggaagagtcgggaaagaaagagaaaggaaagagcatctcactgctgtgcttggagggtttacagaaaatattcagtgctgtgcaacagttctatcagcccaagattcagcagtttctcagagctctggatgtcacagataaggaaggagaagagagagaagatgcagatgtcagtgtcactcagagaacagcattccagatccggcaatttcagaggtccttgttgaatttacttagcagtcaagaggaagattttaatagcaaagaagccctcctgctagtcacggttcttaccagtttgtccaagttactggagccctcctctcctcagtttgtgcagatgttatcctggacatcaaagatttgcaaggaaaacagccgggaggatgccttgttttgcaagagcttgatgaacttgctcttcagcctgcatgtttcgtataagagtcctgtcattctgctgcgtgacttgtcccaggatatccacgggcatctgggagatatagaccaggatgtagaggtggagaaaacaaaccactttgcaatagtgaatttgagaacggctgcccccactgtctgtttacttgttctgagtcaggccgagaaggttctagaagaagtggactggctaatcaccaagcttaagggacaagtgagccaagaaaccttatcagaggcctcttctcaggcaaccctaccaaatcagcctgttgagaaagctatcatcatgcaactgggaactctgcttacatttttccacgagctggtgcagacagctctgccatcaggcagctgtgtggacaccttgttaaaggacttgtgcaaaatgtacaccacacttacagcccttgtcagatattatctccaggtgtgtcagagctccggaggaattccaaaaaatatggaaaagctggtgaagctgtctggttctcatctgacccccctgtgttattctttcatttcttacgtacagaataagagtaagagcctgaactatacgggagagaaaaaggagaaacctgctgccgttgccacagccatggccagagttcttcgggaaaccaagccaatccctaacctcatctttgccatagaacagtatgaaaaatttctcatccacctttctaagaagtccaaggtgaacctgatgcagcacatgaagctcagcacctcacgagacttcaagatcaaaggaaacatcctagacatggttcttcgagaggatggcgaagatgaaaatgaagagggcactgcatcagagcatgggggacagaacaaagaaccagccaagaag

SEQ ID NO: 845 - protein, 1084 aa, Homo sapien
MFKDVPLTAEEVEFVVEKALSMFSKMNLQEIPPLVYQLLVLSSKGSRKSVLEGIIAFFSALDKQHNEEQSGDELLDVVTVPSGELRHVEGTIILHIVFAIKLDYELGRELVKHLKVGQQGDSNNNLSPFSIALLLSVTRIQRFQDQVLDLLKTSVVKSFKDLQLLQGSKFLQNLVPHRSYVSTMILEVVKNSVHSWDHVTQGLVELGFILMDSYGPKKVLDGKTIETSPSLSRMPNQHACKLGANILLETFKIHEMIRQEILEQVLNRVVTRASSPISHFLDLLSNIVMYAPLVLQSCSSKVTEAFDYLSFLPLQTVQRLLKAVQPLLKVSMSMRDCLILVLRKAMFANQLDARKSAVAGFLLLLKNFKVLGSLSSSQCSQSLSVSQVHVDVHSHYNSVANETFCLEIMDSLRRCLSQQADVRLTLYEGFYDVLRRNSQLANSVMQTLLSQLKQFYEPKPDLLPPLKLEACILTQGDKISLQEPLDYLLCCIQHCLAWYKNTVIPLQQGEEEEEEEEAFYEDLDDILESITNRMIKSELEDFELDKSADFSQSTSIGIKNNISAFLVMGVCEVLIEYNFSISSFSKNRFEDILSLFMCYKKLSDILNEKAGKAKTKMANKTSDSLLSMKFVSSLLTALFRVLLWRYTSIPTSVEESGKKEKGKSISLLCLEGLQKIFSAVQQFYQPKIQQFLRALDVTDKEGEEREDADVSVTQRTAFQIRQFQRSLLNLLSSQEEDFNSKEALLLVTVLTSLSKLLEPSSPQFVQMLSWTSKICKENSREDALFCKSLMNLLFSLHVSYKSPVILLRDLSQDIHGHLGDIDQDVEVEKTNHFAIVNLRTAAPTVCLLVLSQAEKVLEEVDWLITKLKGQVSQETLSEASSQATLPNQPVEKAIIMQLGTLLTFFHELVQTALPSGSCVDTLLKDLCKMYTTLTALVRYYLQVCQSSGGIPKNMEKLVKLSGSHLTPLCYSFISYVQNKSKSLNYTGEKKEKPAAVATAMARVLRETKPIPNLIFAIEQYEKFLIHLSKKSKVNLMQHMKLSTSRDFKIKGNILDMVLREDGEDENEEGTASEHGGQNKEPAKK

SEQ ID NO: 846 - DNA, 5887 bp, Homo sapien
ggacgagtcgagcctcctgcggcgccgcgggctccagaaggagctgagcctgccacgccgaggacgtggctgccgcagcgggaaccgcaagagcttggtggtaggaacgccctccccgaccctctcccggcccctgtcgccattgtcggtcccaacggcaggcagcagccccttggatagtcctcggaatttctcggctgcctctgccctaaatttcccctttgcccggagggcagacggcagaagatggtccctcgcgtctctcccatcttccggctatggaaccaacacacccagctccaccctctcgtcaagctcatcctcccgggaacgtctccaccagcttcccttccagccgacgccggacgagctgcacttcctgtccaagcacttccgcagctcagagaatgtgcttgatgaggaaggcggccggtcaccccgcctccgaccccgctctcgcagtctcagcccgggccgtgcaacggggaccttcgacaatgagattgtcatgatgaatcacgtgtaccgggagaggttccccaaggccacagcacagatggagggccgtctgcaggagttcctgacggcctacgcgcccggcgcccggctggcgctggctgatggcgtcttgggcttcatccaccaccagatcgtcgagctggcccgagactgcttggccaagtctggcgagaacctcgtcacctcccgctacttcctagagatgcaggagaagctggagcggcttctgcaggatgcccatgagcgttcggacagtgaggaggtcagcttcatcgtccagcttgtccggaaactgctgatcatcatctcacggccagctcggctgctggagtgtctggagtttgaccctgaggaattttaccacctgctggaggcggctgagggccatgcgcgggagggccaaggcattaagactgaccttccacagtacatcattgggcagctgggcctggccaaggaccccctggaggagatggtgccactgagtcacctcgaagaagaacagcccccagcacctgagtccccagagagccgcgccctggtcggccagtcacggaggaagccatgcgaaagcgactttgagaccatcaaactcattagcaacggagcctatggggccgtctacctggtgcggcaccgtgacacacggcagcgctttgccatcaagaagatcaacaaacagaacttgatcctgcgtaaccagatccagcaggtctttgtggagcgtgacattctcacctttgccgagaacccctttgtggtcagcatgttctgctcctttgagacccggcgccacctatgtatggtcatggaatacgtggaaggcggcgactgcgccacgctcctgaagaacatgggcccgctgcccgtggacatggcccgcctgtacttcgccgagacggtgttggcgctggagtacctgcataactatggcatcgtgcaccgtgacctcaaaccagacaatctgctcatcacctcgcttggccacatcaagctcacggacttcggcctgtccaagatcggcctcatgagcatggccaccaacctctatgagggccacatcgagaaggacgcccgagagttcatcgacaagcaggtgtgtgggacgccggagtacatagcccccgaggtgatcttccgccagggctatgggaagccagtggactggtgggccatgggcgtcgtcctctatgagtttctggtgggctgcgtgcctttctttggagatacccccgaggaactcttcggtcaggtggtcagcgatgagatcatgtggccagagggagatgaggcccttccagcagacgcccaggacctcatcaccaggttgctccggcagagcccgctggaccgtctgggcactggtggcacccacgaagtgaagcagcacccctttttcctggccctggactgggcagggcttctccgacacaaagccgagttcgtgccccagctcgaagccgaggatgataccagctactttgacacacgttcggaacgttaccgccatctgggctccgaggacgacgagaccaatgatgaagaatcgtccacagagatcccccagttctcctcctgctcccaccggttcagcaaggtctacagcagctctgagttcctggccgtccagcccactcctaccttcgctgaaaggagcttcagtgaagaccgggaggaggggtgggagcgcagcgaagtggactatggccgccggctgagtgctgacatccggctgaggtcctggacatcctctggatcctcctgtcagtcatcttcgtcccagcccgagcggggtcccagcccatctctcctgaataccatcagcctggacacaatgcccaagtttgccttctcatcagaggatgagggggtaggcccaggccctgcaggccccaagaggcccgtcttcattctaggggagcctgaccccccaccagcggccaccccagtgatgcccaagccctcgagcctttctgccgacacagctgctctcagccacgcccgcctacggagcaatagcatcggcgcccgacactccacaccaaggcctctggatgccggccggggccgccgccttgggggcccaagagacccagcccctgagaagtccagagcctcctccagcggtggcagtggtggcggcagtgggggccgcgtgcccaagtcagcctctgtctctgccctgtccctcatcatcacggcagatgatggcagcggcggccccctcatgagccccctttccccgcgctctctgtcctcgaacccgtcgtcccgtgactcttcgccgagccgagacccgtcccccgtgtgtggcagcctgcggccccccatcgttatccacagctctggcaagaagtacggcttcagcctgcgggcgatccgcgtctacatgggtgatagcgacgtctacactgtgcaccacgtcgtctggagtgtggaggacggaagccccgcccaggaggcgggcctgcgggctggggacctcatcacccacatcaacggggagtcagtgctggggctggtgcacatggacgtcgtggagctgctgctgaagagcggcaacaagatatccctgcggaccacagccctggagaacacctccatcaaggtgggccccgcccggaagaatgtggccaagggccgcatggcacgcaggagcaagaggagccgtcggcgggagacccaggatcggcggaagtcacttttcaagaagatctccaagcagacctccgtgctgcacaccagccgcagcttctcctccggactccaccactcactgtcatccagtgagagcctccccggctcgcccacccacagcctctcccccagccccaccactccctgccgaagcccagcccctgatgtcccagcagataccactgcatccccacccagcgcatccccgagctccagcagccccgcctccccagctgctgctggccacacccgccccagctccctgcacggcctggctgccaagcttgggccaccccgccccaagactggccgccgcaagtccaccagcagcatcccgccctccccgctggcctgcccgcccatctccgcgcccccaccccgctcgccctcgcccctgcccgggcacccgcccgcacctgcccgatccccgcggctgcgccggggccagtcagctgacaagctgggcacaggggagcggctggatggggaggcggggcggcgcactcgtgggccagaggccgagctcgtggtcatgcggcggctgcacctgtccgagcgccgagactccttcaagaagcaggaggccgtgcaggaggttagcttcgatgagccgcaggaggaggccactgggctgcccacctcagtgccacagatcgccgtggagggcgaggaagccgtgccagtagctctcgggcccaccggaagagactgatcccctgccaggtctctccctggcatcaaagttacgcgttttcttgtgcaatgttttttccgtaaagtcatgcctggatggggactgagccaccagcctgacacccagaaggcgagaagccatctcggtccttgctggaaggtggagacatcgcttgtgttctggtgtcaatcagggggctggatggggcaagaatgggggacaagggtggctttgtaaatagcagcaaatccctgcaactaatttattactttttttttcttttttttttttttttttgagacagagtctcactctgttgccccggctggagtgcagcggcgtgatctcagctcactgcaacctccgcctcccaagttcaagcgattgtcctgcctcagcttcccaagtggctgggattacaggcgcccaccactatgcccagctaattttttgtatttttagtacagacggggtttcaccatgttggtcaggctggtctcgaactcctgacctcatgatttgcctgcctttgcctcccaaagtgctgggattacaggcgtgagccactgggcccagcctaatttattactttttataagcgatagccgtactgagccgccccctgaaggcggctgccaggtcttgccccaggcacctgggactctgtttgcaggccctgccctctgggctgagaaggatgcactttggacaagtcatctgtgtttgtgttttccagtttttctgtactttttaagtgttttgtgttacctggtctcattcccctccccacacctacccatttgaggggatggagttgaagtcacctggtcacctgtaccggcccagttcggctacaacctggagtgtccgtaaacaattcctctcacccacaaaacaatgtaatcccagcgatggactggattctgaaggccacttcccaccatcatagctgccatgcccaggcagtgcctgctctatatatagagtctgcctccaatcctgctggcttcagcctggagaagggatatgggagctggagctttgatggatgaataggtgttcaccggatctgggcagaggggtcatccgctccccaggtgggcactgataaaggaaggtacaggcctcacctggaactgccaaggcagcctccagaaatgctcggctgtctcggggcacgctccagtatgccagtcctgcgggattacgtccagctacttccagaaacactcagtgtcccctcccctcaggctctgccttggcctggccttgtccagtctaccctggacaagatgccgtgtgtttgaggcccagcagagtaagcccttggccgtgatgtgtctgaaacacctgttaggggttccctccatatgtcagagcctctctgggatgaagttcaagccagaaaacccagtcgaggctcaagtttgaatttcagcttcactgtgtggctctgggaaaatggctttcccactctgtgcctcagtttccttgtgtttacaagactaatcccattgactgtttattaagcacctactgtgtgccaagcgcttttacgtggcttctccctcagccagccttgagaaggctggaggtggtgtcatcacctccattttacagacaaagcagctgagaccccagcgaggggcggagacctgtcccacgatcacccagcaggagtcgtggcagaacggagcatcagccagaccctgttgtgggcgttgtcatcaagggagcttgaatggagggtctggtgtcagatacagccgactccagccccagctcatcccccatgatgctgtgtgacccactgggcactctggtgagggagctttccagacatcaacagcccactctgcttccctttctgagtcccctgtccagcactgcctagtgttggagggtagaccaaggctgtgcatgattcaccccctccttccatcctggagctggcagtgaataaaagcccgtatttac

SEQ ID NO: 847 - protein, 1308 aa, Homo sapien
DESSLLRRRGLQKELSLPRRGRGCRSGNRKSLVVGTPSPTLSRPLSPLSVPTAGSSPLDSPRNFSAASALNFPFARRADGRRWSLASLPSSGYGTNTPSSTLSSSSSSRERLHQLPFQPTPDELHFLSKHFRSSENVLDEEGGRSPRLRPRSRSLSPGRATGTFDNEIVMMNHVYRERFPKATAQMEGRLQEFLTAYAPGARLALADGVLGFIHHQIVELARDCLAKSGENLVTSRYFLEMQEKLERLLQDAHERSDSEEVSFIVQLVRKLLIIISRPARLLECLEFDPEEFYHLLEAAEGHAREGQGIKTDLPQYIIGQLGLAKDPLEEMVPLSHLEEEQPPAPESPESRALVGQSRRKPCESDFETIKLISNGAYGAVYLVRHRDTRQRFAIKKINKQNLILRNQIQQVFVERDILTFAENPFVVSMFCSFETRRHLCMVMEYVEGGDCATLLKNMGPLPVDMARLYFAETVLALEYLHNYGIVHRDLKPDNLLITSLGHIKLTDFGLSKIGLMSMATNLYEGHIEKDAREFIDKQVCGTPEYIAPEVIFRQGYGKPVDWWAMGVVLYEFLVGCVPFFGDTPEELFGQVVSDEIMWPEGDEALPADAQDLITRLLRQSPLDRLGTGGTHEVKQHPFFLALDWAGLLRHKAEFVPQLEAEDDTSYFDTRSERYRHLGSEDDETNDEESSTEIPQFSSCSHRFSKVYSSSEFLAVQPTPTFAERSFSEDREEGWERSEVDYGRRLSADIRLRSWTSSGSSCQSSSSQPERGPSPSLLNTISLDTMPKFAFSSEDEGVGPGPAGPKRPVFILGEPDPPPAATPVMPKPSSLSADTAALSHARLRSNSIGARHSTPRPLDAGRGRRLGGPRDPAPEKSRASSSGGSGGGSGGRVPKSASVSALSLIITADDGSGGPLMSPLSPRSLSSNPSSRDSSPSRDPSPVCGSLRPPIVIHSSGKKYGFSLRAIRVYMGDSDVYTVHHVVWSVEDGSPAQEAGLRAGDLITHINGESVLGLVHMDVVELLLKSGNKISLRTTALENTSIKVGPARKNVAKGRMARRSKRSRRRETQDRRKSLFKKISKQTSVLHTSRSFSSGLHHSLSSSESLPGSPTHSLSPSPTTPCRSPAPDVPADTTASPPSASPSSSSPASPAAAGHTRPSSLHGLAAKLGPPRPKTGRRKSTSSIPPSPLACPPISAPPPRSPSPLPGHPPAPARSPRLRRGQSADKLGTGERLDGEAGRRTRGPEAELVVMRRLHLSERRDSFKKQEAVQEVSFDEPQEEATGLPTSVPQIAVEGEEAVPVALGPTGRD

SEQ ID NO: 848 - DNA, 1418 bp, Homo sapien
agaagaagctggccaaggatatgggagcaaccaccatggaccagaagtctctctgggcaggtgtagtggtcttgctgcttctccagggaggatctgcctacaaactggtttgctactttaccaactggtcccaggaccggcaggaaccaggaaaattcacccctgagaatattgaccccttcctatgctctcatctcatctattcattcgccagcatcgaaaacaacaaggttatcatcaaggacaagagtgaagtgatgctctaccagaccatcaacagtctcaaaaccaagaatcccaaactgaaaattctcttgtccattggagggtacctgtttggttccaaagggttccaccctatggtggattcttctacatcacgcttggaattcattaactccataatcctgtttctgaggaaccataactttgatggactggatgtaagctggatctacccagatcagaaagaaaacactcatttcactgtgctgattcatgagttagcagaagcctttcagaaggacttcacaaaatccaccaaggaaaggcttctcttgactgcgggcgtatctgcagggaggcaaatgattgataacagctatcaagttgagaaactggcaaaagatctggatttcatcaacctcctgtcctttgacttccatgggtcttgggaaaagccccttatcactggccacaacagccctctgagcaaggggtggcaggacagagggccaagctcctactacaatgtggaatatgctgtggggtactggatacataagggaatgccatcagagaaggtggtcatgggcatccccacatatgggcactccttcacactggcctctgcagaaaccaccgtgggggcccctgcctctggccctggagctgctggacccatcacagagtcttcaggcttcctggcctattatgagatctgccagttcctgaaaggagccaagatcacgcgcctccaggatcagcaggttccctacgcagtcaaggggaaccagtgggtgggctatgatgatgtgaagagtatggagaccaaggttcagttcttaaagaatttaaacctgggaggagccatgatctggtctattgacatggatgacttcactggcaaatcctgcaaccagggcccttaccctcttgtccaagcagtcaagagaagccttggctccttgtgaaggattaacttacagagaagcaggcaagatgaccttgctgcctggggcctgctctctcccaggaattctcatgtgggattccccttgccaggctggcctttggatctctcttccaagcctttcctgacttcctcttagatcatagattggacctggttttgttttcctgcagctgttgacttgttgccctgaagtacaataaaaaaaattcattttgctccagta

SEQ ID NO: 849 - protein, 385 aa, Homo sapien
MDQKSLWAGVVVLLLLQGGSAYKLVCYFTNWSQDRQEPGKFTPENIDPFLCSHLIYSFASIENNKVIIKDKSEVMLYQTINSLKTKNPKLKILLSIGGYLFGSKGFHPMVDSSTSRLEFINSIILFLRNHNFDGLDVSWIYPDQKENTHFTVLIHELAEAFQKDFTKSTKERLLLTAGVSAGRQMIDNSYQVEKLAKDLDFINLLSFDFHGSWEKPLITGHNSPLSKGWQDRGPSSYYNVEYAVGYWIHKGMPSEKVVMGIPTYGHSFTLASAETTVGAPASGPGAAGPITESSGFLAYYEICQFLKGAKITRLQDQQVPYAVKGNQWVGYDDVKSMETKVQFLKNLNLGGAMIWSIDMDDFTGKSCNQGPYPLVQAVKRSLGSL

SEQ ID NO: 850 - DNA, 5183 bp, Homo sapien
ggaataacaaaacatgctcttaaccatcatccccctccagagaagctggaggaaatttcccccaccagtgacagtcatgagaaagacacaagttcccaaagcaagtctgacatcacaagagaatcatcttttacatcagccgacactgggaattcactgtctgcttttccaagttatacaggcgcagggatatctactgaaggaagctcggacttctcctggggatatggtgaactcgatcaaaatgccactgaaaaagtccagacaatgttcacagccattgatgaactcttgtatgagcagaagttgagtgtgcataccaagagtctacaagaagagtgccaacagtggacagctagctttcctcacctcaggattctaggtaggcagataatcactccaagtgaaggttatagattgtatcctagatccccttctgctgtttccgcttcatatgaaacaaccttgtctcaagaaagagattctactatatttggtataaggggaaagaagttacatttttcatcttcttatgctcataaagcatcttccattgccaaatcctccagcttttgttctatggaaagagatgaggaagactctataatcgtctcagaaggaataattgaggaatacctagcattcgatcacatagatatagaagagggatttcatgggaagaaatcagaagcagctacagagaaacagaaattagggtatcctcccattgctccattttactgcatgaaagaagatgtccttgcttatgtgtttgacagtgtatggtgcaaggttgtgagctgtatggagcagttgacacgtagtcactgggaaggatttgcctctgatgatgagagtaatgttgcagttaccagacccgattcagaaagttcctgtgtgctgagtgaactacatcctttggtgttaccgcgagtgccacagtctaaggtgctgtacattacctcaaatccgatgagtctctgtcaagcaagcagacatcagccaaatgtgaatgatctcttggttcatggaatgcctctacagccaagaaatctctccctaatggacaagctcctagatcttgatgacaagctacttatgaggcctgggtccagtaccatcctttcaactcgaaattggccaaatcgagctgtggagtttagtacatcatctctgtcatacacagtgcagtccaccaggagacgcaatccaccaccacgaactcttcatccgatcagcacgagccattcatgtgctgaaacaccaagatctgtggaagaaatcctcagaggagcccgagtcccagtggcacccgactcgctctcctctccctcaccgacgcccctgagtcgaaataatctgctaccacctattggcacagctgaagtggaacatgtgagcactgtggggccacaaagacagatgaaaccccatggcgactctagtcgagctcaaagtgcggtggtggatgaacctaactatcagcagccacaagaaaggctccttttgcccgactttttccccaggcccaacacaactcaatcatttttgctggatacacagtatcgtcgctcatgtgcagttgagtatcctcatcaggcccgacctggcaggggatctgcaggtcctcagttacatgggtctacaaaatctcaaagcggaggcagaccagtctctcgaaccaggcagggaccataaggcaaatgagaagaatctatcaggctgcaggaaacacgagatttcatgaagcagtattcagtcatcaagtgatgcagagcttgtatagaagatcgactagaaatcatcttcatgaagagtgattttggcacaagtgaccgaagaacaaaacaccatagcagccaaaaatgacatgagtgttgtttctatctccagttactgtctctttcagcagaaattaacctatcccattggaaaggcaagtttgtacccaaagatgcaacagtgaataatacccaaatcactgctcatgttatctcttaacaatgatcagttcaatcatataggatttgatgagctcacacatacacaaaaagcagcaaatcatcagtgacaatatcactggcttcagaatacttcagcctgtgttcatttctggagagttgtactcagttttaagtcattttgctgttgaaaatctgacctcatcaaatagatgtcattcctaaaactctctttagatgtcctaccctatcagcagattaaaatggaaggggtgtgtaactaaaaacataaatgttaagcattagtataaagtaacttctgtaataaattatatcgcatattttttcagataggacagctcaaccttacgatgcctacctgatgccaggtgatgcttattttcttcctaaagtaggttactggtcatatcttttttccaaatattaaatgcaccttgccagatattctcctgcagctctaaggaaaggaaatcaatttaaaaataatttgtagaatctactattgagccaccaaagtataattccctaaaagtttaagaaaccctggcaattaattcagcataaacatatcctataaacagcaggagaggttcagctttctgattttactgtggaccttttcctaagggcattcatgaatgcagcaacagttttaactatggcttacatttattttaaatttcactaaatacaaatcttgattgtcatgccagttttagatcttattaattttcagaatggataaattcaaataatcataaattacggtaactttttattataccaaggtgttctaatgccatcatatgaagacagatgcttcaaacaacctgcattaaattatatttttaataaaattaaaatctatttttaacctatttgtagtcacaaaccgaaaacgtgtcgtctttaccttagagctaaaggcttactttatgcatacggtatatttaatagtctacaaatcaaagatttaaacagtcccttaaaaattccatatattttcataccaactcatctacatagaaatgaaaatctctattgttctcacaaaccattaccatgagttcactataacaactggatcaatatggcttgcctttcaaagttaaagaatcagaaaggggcctgtaagaagtcatttagcccaattccctcaccctgtgtgttttccctcaaagccagtgcaatttttttttaaccaaaaaactggacatgtttaatacatacagtttgacaaatttggatttcactctttgttttgatgtagtaactcttttataaaagggaacagattcagacaagctcagtggcccaactgaagacattcagcaattaatggcaggacttcagtaatcagtggcaggactacaacatacatctcttcatgctagggaaaccaggctctctattataaagctgaccagggctattgttttccccttttctctcatcctaaacaccattcatatttttcctaggtcacattttagtgggatcatttacaaagcccccagaacttaatcatcatgttttaccttttttattgaattatatacacctcttacaaaaatgcttgaagtaatttaacacctgtacatcagtacaaaacctggctgagtaaaatgaagagaggatctattcaagatcattaagaccaaatgtaaactgggaagtatgtggaagatagctgtccagcaagtgtctggaaggtgttctagctgggtagagagcctattctaacagacacgcacatcgcagaaagcagcatgaacagaaccacatcctagataagagttctgtgtacagaagatccatggaggcaagtgctgtcaggaaggacactgcctccctccaccctcccaaatgtcaccaccaagttccttcaggtgagacctcacacaatgtcaagtgctttctaggaaatactaagatcaggttgagagattctgcttggtctagtcaatctgaaaaattcaggctggaaagacaccttttctcaagagctgaattgacttttgccttcaaatcctgcctgcaccttgcctacgatggcatcaatttacacctaaggacctttgaagagaaaaattccattatttcttttctttcttgagagcagattttttccctcctcctttggaagatttgcagtactttgcttccatctgagccagaaaattgtccatttccttttgccgatccttttgtctgctctgtttgagaagttaaaacacaagctttcacaacattatccatagacagaaagtacctagtggttgccaggggctggaaaagtggaataactactaatgggtatggagtttttttggaatggtgaaaatgtcctacaattggtgttaataattgtaaaactttgtaaatacacttaaaaccaccaaattgtacactttaaaaggacaaatagaaggtatgcggttatgtcttaaaagaagaaaacaaaatacaacattccaaagaaaatattagcagtaggaatcagatcattaaagatgtggcaacaaactgccaagtttacctgaatggctgccttcaggctatccacgccttcatcaagccccaactcctttctgctcatttctgcttctttggcctcttcctgagcctgaaacaggaactcacatgagactcagggccaccaggaaatgcttaaaatacatactctttcccaaaagcaaatctataattctgtttcaattttatgaatatatgaatagacaaaatgaatcgaattacataactatgtcattcattaaatggcaacaatgctgacagcaagcagtagatcctctgattccaattaccatttgttttttacccaattctatttgctagaggtagtaagtactctggcactcataaatcacatgatgataaaaaggaacatgaggccgggtatggtggctcacaactgtaatccccataccttgggaggccaaggtgggaggatcacttgaactcaggagttcaagacctgcctgggtaacatagtgagacctcagttctataaaaaagaaaagaaatgagcctggtgtggtggcatgtgcttgtagtcccagctactagggaggctgaggtgggaagatggcttcagtctgagagttcaggctgcaataagctgtgatcatgcctctgcactccagcctgggtgatggagatgccatctcttagaaaaaagag

SEQ ID NO: 851 - protein, 565 aa, Homo sapien
GITKHALNHHPPPEKLEEISPTSDSHEKDTSSQSKSDITRESSFTSADTGNSLSAFPSYTGAGISTEGSSDFSWGYGELDQNATEKVQTMFTAIDELLYEQKLSVHTKSLQEECQQWTASFPHLRILGRQIITPSEGYRLYPRSPSAVSASYETTLSQERDSTIFGIRGKKLHFSSSYAHKASSIAKSSSFCSMERDEEDSIIVSEGIIEEYLAFDHIDIEEGFHGKKSEAATEKQKLGYPPIAPFYCMKEDVLAYVFDSVWCKVVSCMEQLTRSHWEGFASDDESNVAVTRPDSESSCVLSELHPLVLPRVPQSKVLYITSNPMSLCQASRHQPNVNDLLVHGMPLQPRNLSLMDKLLDLDDKLLMRPGSSTILSTRNWPNRAVEFSTSSLSYTVQSTRRRNPPPRTLHPISTSHSCAETPRSVEEILRGARVPVAPDSLSSPSPTPLSRNNLLPPIGTAEVEHVSTVGPQRQMKPHGDSSRAQSAVVDEPNYQQPQERLLLPDFFPRPNTTQSFLLDTQYRRSCAVEYPHQARPGRGSAGPQLHGSTKSQSGGRPVSRTRQGP

SEQ ID NO: 852 - DNA, 5183 bp, Homo sapien; identical to SEQ ID NO: 850

SEQ ID NO: 853 - DNA, 8162 bp, Homo sapien
gcggcggtgcggcccaggctgcagctgagcgctctgcgcggcgcagccgggtctcccgcgtgtaccacgccgtgacaggtgcagagtccgggctgaggacccacctgcagccgccgccgcgatgcccaccatgcggaggaccgtgtcggagatccgctcgcgcgccgaaggttatgagaagacagatgatgtttcagagaagacctcactggctgaccaggaggaagtaaggactattttcatcaaccagccccagctgacaaaattctgcaataaccatgtcagcactgcaaaatacaacataatcacattccttccaagatttctctactctcagttcagaagagctgctaattcattttttctctttattgcactgctgcagcaaatacctgatgtgtcaccaacaggtcgttatacaacactggttcctctcttatttattttagctgtggcagctatcaaagagataatagaagatattaaacgacataaagctgataatgcagtgaacaagaaacaaacgcaagttttgagaaatggtgcttgggaaattgtccactgggaaaaggtggcagtaggggagatagtgaaagtgaccaatggggaacatctcccagcagatctcatcagtctgtcctcaagtgagccccaagccatgtgctacattgaaacatccaacttagatggtgaaacaaacttgaaaattagacagggcttaccagcaacatcagatatcaaagacgttgacagtttgatgaggatttctggcagaattgagtgtgaaagtccaaacagacatctctacgattttgttggaaacataaggcttgatggacatggcaccgttccactgggagcagatcagattcttcttcgaggagctcagttgagaaatacacagtgggttcatggaatagttgtctacactggacatgacaccaagctgatgcagaattcaacaagtccaccacttaagctctcaaatgtggaacggattacaaatgtacaaattttgattttattttgtatcttaattgccatgtctcttgtctgttctgtgggctcagccatttggaatcgaaggcattctggaaaagactggtatctcaatctaaactatggtggcgctagtaattttggactgaatttcttgaccttcatcatccttttcaacaatctcattcctatcagcttattggttacattagaagttgtgaaatttacccaggcatacttcataaattgggatcttgacatgcactatgaacccacagacactgctgctatggctcgaacatctaatctgaatgaggaacttggccaggttaaatacatattttctgacaaaactggtactctgacatgcaatgtaatgcagtttaagaagtgcaccatagcgggagttgcttatggccatgtccctgaacctgaggattatggctgctctcctgatgaatggcagaactcacagtttggagatgaaaaaacatttagtgattcatcattgctggaaaatctccaaaataatcatccaactgcacctataatatatgaatttcttacaatgatggcagtctgtcacacagcagtgccagagcgagaaggtgacaagattatttatcaagcagcatctccagatgagggagcattggtcagagcagccaagcaattgaattttgttttcactggaagaacacccgactcggtgattatagattcactggggcaggaagaaagatatgaattgctcaatgtcttggagtttaccagtgctaggaaaagaatgtcagtgattgttcgcactccatctggaaagttacgactctactgcaaaggagctgacactgtaatttatgatcgactggcagagacgtcaaaatacaaagaaattaccctaaaacatttagagcagtttgctacagaagggttaagaactttatgttttgctgtggctgagatttcagagagcgactttcaggagtggcgagcagtctatcagcgagcatctacatctgtgcagaacaggctactcaaactcgaagagagttatgagttgattgaaaagaatcttcagctacttggagcaacagccattgaggataaattacaagatcaagtgcctgaaaccatagaaacgctaatgaaagcagacatcaaaatctggatccttacaggggacaagcaagaaactgccattaacatcggacactcctgcaaactgttgaagaagaacatgggaatgattgttataaatgaaggctctcttgatggaacaagggaaactctcagtcgtcactgtactacccttggtgatgctctccggaaagagaatgattttgctcttataattgatgggaaaaccctcaaatatgccttaacctttggagtacgacagtatttcctggacttagctttgtcatgcaaagctgtcatttgctgtcgggtttctcctcttcaaaaatctgaagttgttgagatggttaagaaacaagtcaaagtcgtaacgcttgcaatcggtgatggagcaaatgatgtcagcatgatacagacagcgcacgttggtgttggtatcagtggcaatgaaggcctgcaggcagctaattcctctgactactccatagctcagttcaaatatttgaagaatttactgatgattcatggtgcctggaactataacagagtctccaagtgcatcttatactgcttctacaagaatatagtgctctatattatcgagatctggtttgcctttgttaatggcttttctggacagatcctctttgaaagatggtgtataggtctctataacgtgatgtttacagcaatgcctcctttaactcttggaatatttgagagatcatgcagaaaagagaacatgttgaagtaccctgaattatacaaaacatctcagaatgccctggacttcaacaccaaggttttctgggttcattgtttaaatggcctcttccactcagttattctgttttggtttccactaaaagcccttcagtatggtactgcatttggaaatgggaaaacctcggattatctgctactgggaaactttgtgtacacttttgtggtgataactgtgtgtttgaaagctggattggagacatcatattggacatggttcagccacatagcgatatgggggagcatcgcactctgggtggtgtttttgggaatctactcatctctgtggcctgccattccgatggcccctgatatgtcaggagaggcagccatgttgttcagttctggagtcttttggatgggcttgttattcatccctgtggcatctctgctccttgatgtggtgtacaaggttatcaagaggactgcttttaaaacattggtcgatgaagttcaggagctggaggcaaaatctcaagacccaggagcagttgtacttggaaaaagcctgaccgagagggcgcaactgctcaagaacgtctttaagaagaaccacgtgaacttgtaccgctctgaatccttgcaacaaaatctgctccatgggtatgcgttctctcaagatgaaaatggaatcgtttcacagtctgaagtgataagagcatatgataccacgaaacagaggcccgacgaatggtgatggggagagcctgaaaggcaggctctgttacctctctaaggagagctaccaggttgtcaccgcagtctgctaaccaattccagtctggtccatgaagaggaaaggtagatctgagctcatctcgctgatggacattcagattcatgtatattatagacataagcactgtgcaactgtactgtaacaccatctcttttggatttttttaaggtatttgctaagtctttgtaaacggaaattgaaaatgacctggtatcttgccagagggctttcttaaacggagaataagtcagtattcttatgccattactgtggggctgtaactgactgtcagtttattggctgtaccacaaggtaaccaaccattaaaaaactctaaatgatatttagttaaagggactcttggtatccagacttagatttcaggatatgctgaaacaaaccagcattcttaaggaactgactcaccttcctgagcaaaatttctaaacaagcatttgtgtccaaaattgtcttgataaatgtttgccaaagaggttcagtaagtgtttttctagttcagtagtcatatgcccagaaatgtaagagaaagtttacttccagttccgctgtaagatctgcatgcctgactttccaaatgtaagagtgatttacaaaaatgaatatttcaaggcatttgctactaaaatcggtgatgttgcacctttggccttacaaatgcttctttgttgtttgtcgtgtttatttgttagaggacacacgtgttaatgtgactctgttgttatgacactgatttttcaaactatgtatgtttcaggtatttctgatgaagtttcatcatcatttagatttttctaaaaatctggctaatgcagtagattgagtgatgtcattttgtcttaaagtttttcctcttaagaaacatatgctacgtatttacgtgggatttccaaagcttctgttgcaatatttggaataacatgtcagataaatgcatgggcttttgtcctgtgttccagttcccactagagatgcctgtgtcttgtgtagcacacccagtgttatggtgactgccccctatactgaagactgaaaattatttcacagttcactcatcaaatagttcccaaaattcgtcacatgctgcttattgggacaaataggtagtacattttccccatttaaaaaatgcggattttactcaggccggtaactttacagtcagaggacacgttcatcatgagtagcttttgttagtatgttttaaaatgtatcttcagttcaattattttcagcatttacaagacatctgaaaatggctattttgctaccaacagtaaatgaaggggctgtttaaaaaccacaaccagttttctacactattttttaaataatactttcatttgaaaaaaaggaattagttttcagatacacttcagagattgaagcaaactatttgccttttactcaaaagcctgcttgcctttacatggacttaccagcaaaataggtagaactttctcttttaaaaaaagtcaactagaattgagaagaggtgattttttttcagatcgcttctcgagtttaatattttcacattcttttcaccctttttctcaatctagatttaaaattaggatatatgtcatttccttgtctgtatttgtagctccttagttaccagtatgcctctccattttctacaaataagaggttataacacatatacataattctaaccttaagggaacacacgtttacatactttacttcccaagcccttcctgtttggggtacagattgagagagtcatgaatcaacacatctagcaagaccacaggtgtaagagtctaagatcgtcttcaaaattctgaagtcccagtctttacctgtccagtgaatgaatattcagagcagcttttcctgggcttcccagtggtgatagctgaggtcaaaccacaaaaaataagaaagcaagagtgaaatgcacccctccagagaaacactttgtagtgtttaattctgttaatagagaagagctgcttctgtttgcgctcacttcatcagtggcacccttctgcagaattttaatataaaaacattatggatataatagaactggattttctgacttaaaaatgtaagttttattttaatcttgaaacgtggattgtttctgtggagctcttaaacatgagaagaatacttacggttgataatgtgtaacatgatctgaaatgtgactaatttgagcctctttgtcccatcgtcctgtttttgaattattgacattgtcagtctctttgcttcctgggtgagacttggggtttgagggacagggaatgaccttcttggtgaaacttaaaatataacattgcaattgcagtgactttacagtgttaaattagagaaaatagtctgattttttaaaccttccttaactggaaaaaagtcacatggttttaccaggattgaaataaacagtcaatgtgacttttaacatgtgtttttttgaaataaagggcacgtactcttcaattaaaaagttccttatagggactctggcaaatgctaacacagttgctttacaatgtttacaattcagacaatacgacttataatagaaaatcctcattcatttagcattgaaaagctggaagttgcttctttaatgttgaatagtatacagtggtattgagcatggactttctaaatgttttatatatacatataaaaatatattggtgtctcacacccagaaagatgttatattgtagatattattaggaaaacagtgtttctcaggaacgttgtaaattttaaatgatatatgtacttcccgtcctcccacctccactctgtgctctaatgtgagactgcttcagcagtgttgctaagttaatggaaaactttttctaatcaagtcaggtgaatgtgtattctgctaaataatgttagccatttacatgaattgtatggtcattaaatggaatcagtgattcctctttaatttccagaggggaaatgaattatggaaatcagtcagcattctgatcattaaattttatactttaattttgccgttcagcattctaaatatccaatgtgaaagtcacatgataatttgttttgcattgcgtgcactgtacaacacttacaacttgtcatttaaaatgttttctcgggaaatgaatgctagtcagaaagtaatagattgtattattcatagttttaaaattatgacaatgtcataattactacaaagctaaataatcgtgtttatttttgtgcagttgccctttgatagttcctggttttaaaacctattaagtgtataatcttacaaatagtcatctacaaaatttatggagaaagtgcccagcccattcacatcacatggaccaggaattcttttgtaaatgacttaaggtaacatcatgcagttcagtgcctaataaatgctttttaatgatgagcatttctataatgactcgtaagataccatagtctgatttttctcacattaaaataactgaagtcacttgtgtaacgtagttatactttgctgcattttaattaaccttcaacagctattaaagtggaatgtaagttaaattttgaaggaaaggaaataaatgttttccatatttcgtcttgatttactttctgtatgagaacagctgtgtttttgataggtttatggtttgcatgagttcatatttaaagtgatccaggccaatgcatggctattgctgtaaatcttgatgtttatttctgccttgtaaagttctatcacggcctacctggaatttaaaattcagtagacaaattaattggtcctctgcacaacttttttaataagtagattattttacaaagaaatttgaacaaatttaattgaatcttttgtttagcttgcctctaagaacttttcttaataaagctcccaaaacttctcagcaaataaatctcccttaagtaggaaaactagatttcatatttgcttactttgaattaacagcaactttccacaggtaaatctgttcttgcaaagatgtgagcagaatagttaaaaataatatttttatgtttcatggttctaaatggaagccataaatgcagtaaatactatctgttgtttaactactttaatcgtcattttttacattttcaagtttattaggttaagaaaaacagggcagccttggaaggcagctactacagaaaactgcagttttgcgttaaagataaagtagtattttcagctccctgaaaaaccattcctgctgaaactgctgtagaaattgtgaagctgcatgagtggagagtattgaatctgtggttatagtagttttctcaggtttgtttatcttgatgtttgatgcactgtgttttatagttattaaaattgagtaatattatttctatgcagtgttatgtgtcattggccttttgtgaatgtgcatgttttaaactgcaaattttaaacattttgtcctctaattgttattaaaaatgaaataaactttaccattacttaaaaaaa

SEQ ID NO: 854 - protein, 1164 aa, Homo sapien
MPTMRRTVSEIRSRAEGYEKTDDVSEKTSLADQEEVRTIFINQPQLTKFCNNHVSTAKYNIITFLPRFLYSQFRRAANSFFLFIALLQQIPDVSPTGRYTTLVPLLFILAVAAIKEIIEDIKRHKADNAVNKKQTQVLRNGAWEIVHWEKVAVGEIVKVTNGEHLPADLISLSSSEPQAMCYIETSNLDGETNLKIRQGLPATSDIKDVDSLMRISGRIECESPNRHLYDFVGNIRLDGHGTVPLGADQILLRGAQLRNTQWVHGIVVYTGHDTKLMQNSTSPPLKLSNVERITNVQILILFCILIAMSLVCSVGSAIWNRRHSGKDWYLNLNYGGASNFGLNFLTFIILFNNLIPISLLVTLEVVKFTQAYFINWDLDMHYEPTDTAAMARTSNLNEELGQVKYIFSDKTGTLTCNVMQFKKCTIAGVAYGHVPEPEDYGCSPDEWQNSQFGDEKTFSDSSLLENLQNNHPTAPIIYEFLTMMAVCHTAVPEREGDKIIYQAASPDEGALVRAAKQLNFVFTGRTPDSVIIDSLGQEERYELLNVLEFTSARKRMSVIVRTPSGKLRLYCKGADTVIYDRLAETSKYKEITLKHLEQFATEGLRTLCFAVAEISESDFQEWRAVYQRASTSVQNRLLKLEESYELIEKNLQLLGATAIEDKLQDQVPETIETLMKADIKIWILTGDKQETAINIGHSCKLLKKNMGMIVINEGSLDGTRETLSRHCTTLGDALRKENDFALIIDGKTLKYALTFGVRQYFLDLALSCKAVICCRVSPLQKSEVVEMVKKQVKVVTLAIGDGANDVSMIQTAHVGVGISGNEGLQAANSSDYSIAQFKYLKNLLMIHGAWNYNRVSKCILYCFYKNIVLYIIEIWFAFVNGFSGQILFERWCIGLYNVMFTAMPPLTLGIFERSCRKENMLKYPELYKTSQNALDFNTKVFWVHCLNGLFHSVILFWFPLKALQYGTAFGNGKTSDYLLLGNFVYTFVVITVCLKAGLETSYWTWFSHIAIWGSIALWVVFLGIYSSLWPAIPMAPDMSGEAAMLFSSGVFWMGLLFIPVASLLLDVVYKVIKRTAFKTLVDEVQELEAKSQDPGAVVLGKSLTERAQLLKNVFKKNHVNLYRSESLQQNLLHGYAFSQDENGIVSQSEVIRAYDTTKQRPDEW

SEQ ID NO: 855 - DNA, 1511 bp, Homo sapien; identical to SEQ ID NO: 458

SEQ ID NO: 856 - protein, 296 aa, Homo sapien; identical to SEQ ID NO: 459

SEQ ID NO: 857 - DNA, 1433 bp, Homo sapien
aatttggggccaagattaacacccctcctgcaggaggaagacagccaccagcggctgctcatggggctgatggtgtctgagctaaaagaccattttttgagacacctacagggtgtagaaaagaagaaaattgaacagatggttctggactacatttcaaaactgctggatctcatttgccacatcgtagaaaccaattggaggaaacataatcttcattcctgggttctccacttcaatagtcgtggcagtgctgctgaatttgcagtttttcacatcatgaccaggattctggaagctacaaacagtttgtttttacctctgcctcctggttttcatactctgcacaccatcctcggggtccagtgtctccctttgcataacctgctgcattgcattgacagtggagtgttgcttctcactgaaacagctgtcataaggctcatgaaagatctggataatacagagaaaaatgaaaaactgaaattcagtatcattgtgcggcttcctccgcttattgggcagaagatttgtagactttgggatcatcctatgagttctaacatcatttcgcggaaccacgtgacgcgactgcttcagaactataagaaacagcctcggaattctatgattaacaagtcatcgttcagtgtagaatttctgcctctgaactacttcattgaaattctgacagatatagagtcctccaatcaagccctgtatccttttgaaggacatgacaatgtggatgcagaatttgtagaggaagcagctctgaaacacaccgcgatgcttttaggcttatgaaaaagaaaacgcaattggatctgctgctgccattttaatcttgctcattaaccttactcctctgagaattctttaacaatatttaaaattggtaacaaaaatagtttagccataattgtttagccatgtgagtttcaggttggtacacgttcagacagaactgctgtatcacattccaattttgaatagccagtgagcaatcaagtgtagagaaatgataaatggcctaagaaggcatacagtggcataaacgatgctcttcctagtagcttaataggccacaagctagtttctgttgcactctgaaataaaatatgctttaaaaatgtagggaacagtgcttagaaaagcaaaaactaggtgtgtcattgaaataataggcataaaaattaaatgttacataagaacactatttggaaagagggtccttttaaaaactgaatttgtactaaatcagatttgccatgtcccagtccagaataatttgtacttagtatttgcagcagggtttgtctttgtgaattcagatgaaacatatttatttttttttatttataaaaggttgatttaggaatattttgtcagtcattaaaaaacctgaaaacataaaaaaaaaaaaaaaaaaa

SEQ ID NO: 858 - protein, 268 aa, Homo sapien
NLGPRLTPLLQEEDSHQRLLMGLMVSELKDHFLRHLQGVEKKKIEQMVLDYISKLLDLICHIVETNWRKHNLHSWVLHFNSRGSAAEFAVFHIMTRILEATNSLFLPLPPGFHTLHTILGVQCLPLHNLLHCIDSGVLLLTETAVIRLMKDLDNTEKNEKLKFSIIVRLPPLIGQKICRLWDHPMSSNIISRNHVTRLLQNYKKQPRNSMINKSSFSVEFLPLNYFIEILTDIESSNQALYPFEGHDNVDAEFVEEAALKHTAMLLGL

SEQ ID NO: 859 - DNA, 5338 bp, Homo sapien
ggccgcgagtgcatcttccacgaacctaattcatctctccagcaaaggacacatctctccagcaaaggacacctctctccagcaaaggacacctgcagagatgtccccagtccttcacttctatgttcgtccctctggccatgagggggcagcctctggacacactcggaggaaactgcaagggaaactgccagagctgcagggcgtcgagactgaactgtgctacaacgtgaactggacagctgaggccctccccagtgctgaggagacaaagaagctgatgtggctgtttggttgccccttactgctggatgatgttgctcgggagtcctggctccttcctggctccaatgacctgctgctggaggtcgggcccaggctgaacttctccaccccaacatccaccaacatcgtgtcagtgtgccgcgccactgggctggggcctgtggatcgtgtggagaccacccggcgctaccggctctcgtttgcccaccccccgtcagctgaggtggaagccattgctctggctaccctgcacgaccggatgacagagcagcacttcccccatcccatccagagtttctcccctgagagcatgccggaacccctcaatggccctatcaatatactgggtgagggccggcttgcgctggagaaggccaaccaggagcttggtctggctttagactcttgggacctagacttctacaccaagcgcttccaggagctacagcggaacccgagcactgtggaggcctttgacttggcgcagtccaatagcgagcacagccgacactggttcttcaagggccagctccacgtggatgggcagaagctggtgcactcactgtttgagtccatcatgagcacccaggaatcctcgaaccccaacaacgtcctcaaattctgtgataacagcagtgcaatccagggaaaggaagtccgattcctacggcctgaggaccccacacggccaagccgcttccagcaacagcaagggctgagacatgttgtcttcacagcagagactcacaactttcccacaggagtatgcccctttagtggtgcaaccactggcacagggggccggattcgagatgtccagtgcacaggccgcggggcccacgtggtggctggcactgccggctattgctttggaaatctgcatattccaggttacaatctgccctgggaggatctaagcttccagtatcctgggaattttgcccggcccctggaggttgccattgaagccagtaatggagcttctgactatggcaacaagtttggggaaccagtgctggctggcttcgcccgctccttgggcctccagctcccagacggccagcggcgtgagtggatcaagcccatcatgtttagtgggggcattgggtccatggaagctgaccacataagcaaggaggccccagagccaggcatggaagttgtaaaggttggaggtcccgtctacaggattggagttggaggtggagctgcttcatctgtgcaggtgcagggagataacaccagtgacctggactttggggctgtgcagcgaggagacccggagatggaacagaagatgaaccgtgtgatcagggcttgtgtggaggcccccaagggaaaccccatctgcagccttcatgatcagggcgctggtggcaatggcaatgtcctaaaagagctgagtgacccagctggagccatcatttacaccagccgcttccagcttggggacccaaccctgaatgccctggaaatctggggggctgagtaccaggaatcaaatgctcttctgctgaggtcccccaaccgggacttcctgactcatgtcagtgcccgtgaacgttgcccggcttgcttcgtgggcaccatcactggagaccggagaatagtgctggtggacgatcgggagtgtcctgtcagaagaaatggccagggggatgcccccccgacacccccgccaacccctgtggacctggagctcgaatgggtgctgggcaagatgcctcggaaggagttcttcctgcagaggaagccccccatgctgcagcctctggccttgcccccagggctgagcgtgcaccaggctctggagagggttctgaggctgcccgccgtggccagcaagcgctacctcaccaataaggtggaccgctccgtgggaggcctggtggcccagcagcagtgcgtggggcccctgcaaactcctctggcagatgtagcggttgtggcactgagccatgaggagctcataggggctgccacagccttgggagaacagccagtcaagagcctgctggacccaaaagtcgccgcccggctggccgtggccgaagccctcaccaacctggtgtttgctctggtcactgacctccgggatgtgaagtgtagcgggaactggatgtgggcagccaagctcccaggggagggcgcagctttggcggatgcctgtgaggctatggtggcagtgatggcagccctgggtgtggcagtggatggtggcaaggactccctcagcatggctgctcgggttggcactgagaccgtgcgggctcctgggtcactggtcatctcagcctatgccgtctgcccagacatcacagccactgtgaccccagacctcaagcatcctgaagggagaggccatctgctctatgtggctctgagccctgggcagcaccggctcgggggcacagctctggcccagtgcttctcccagcttggggaacaccctccagacctggaccttcctgagaacttggtgcgggccttcagcatcactcaggggctgctgaaagaccgcctcctctgctcaggccacgatgtcagtgacggaggcctcgtcacatgcctgctggagatggcctttgctggaaattgcgggctacaggtggatgtgcctgtccccagggttgatgtcctgtctgtgctgttcgctgaggagccaggcctcgtgctggaggtgcaggagccagacctggcccaggtgctgaagcgttaccgggatgctggcctccattgcctggagctgggccacacaggcgaggccgggccccacgccatggtccgggtgtcagtgaacggggctgtggttctggaggagcctgttggggagctgcgagccctctgggaggagacgagtttccagctggaccggctacaggcagagcctcgctgtgtggcagaggaggaacggggcctgagggagcggatggggcccagctattgcctgccccccacctttcccaaagcctccgtgccccgtgagcctggtggtcccagcccccgagtcgccatcttgcgagaggagggcagtaatggagaccgggagatggccgatgccttccacttagctgggtttgaggtatgggacgtgaccatgcaggacctctgctctggggcaattgggctggacactttccgtggcgtggccttcgtgggcggcttcagctatgcagatgtcctgggctctgccaaagggtgggcagctgctgtgacctttcatcccagggctggggctgagctgaggcgcttccggaagcggccagacaccttcagcctgggcgtgtgtaatggctgtcaactgctggctctgctcggctgggtgggaggcgaccccaatgaggatgctgcagagatgggccctgactcccagccagcccggccaggccttctgctacgccacaacctgtctgggcgctacgagtctcgctgggccagcgtgcgtgtggggcctgggccagccctgatgctgcgagggatggagggcgccgtgctgcccgtgtggagtgcgcacggggaaggttacgtagcattttcttctccggaactccaagctcagattgaggccaggggcttggctccactgcactgggctgatgatgacgggaaccccacagagcagtaccctctgaatcccaatgggtccccagggggcgtggctggcatctgctcctgtgatggccgccacctggctgtcatgcctcaccctgagcgggccgttaggccttggcagtgggcatggcgaccccctccatttgatactctgaccacctccccctggctccagctctctatcaatgcccgaaactggaccctggaagggagctgctgactggccacaggggctcacctgggccccatggcttttcacctaagtgggtcctgccccctcccccatgaccttcaggagcaccccatattatttccaaaaatatcttggacagacaaggaccaaaatgccaaaatctcagcggactcgatgatctgcctgctgatgttccttctgtggctgtgtctattttcagttctgctctaacatggcatgccctttctcagcccaggaaacagcatgtggttcagagaaaagagcgacaaggaaaagttaggactcctgaggtccgaacaggggcttctgttgcccacttcacaacacccagtgatcaccggtgtgcaattgcctccttggctctgagggatgttttgcgctcccttttctcatcattggggttagcgggtgcagacaaattcagcaatagtatgcagatcagcccctcaccacctcattgttctcatctggaactgaaactttctggatttctcttgaagtgctacactgcactgaatgtaaggaattgttgcttgtggaagtttctcagcgtttctggctgtcttagggctggcctcagaacccagcattcctgttatttgcttctaaattagcagctctctttttttttttttttttgaggcagtctcactctgtcacccaggctggagtgcagtggcgtgatctcggcccactgcaacctctgcctcctgggttcaagcaattttcctgcctcagcctcccgagtagctgggagtacaggcacacaccaccacacccagctaatttttgtatttttagtagagatagggtttcaccgtgtctcccaggctggtctcaaactcctaacctcaagtgattcgcctgcctcggcctcccaaagtgctgggattacaggtgggagccactacagctggcccagcagctctgtttctgatagaggtggttggggctctcatccctagatcctaaccctttagtatgctggaattctactcttcacttactgcattgactgttgttgattagttattattgcaaagcactgccaccggcctcagggagtttatgtgtaatagaattaaaaataatagctgtgtataacacttagctcaagccacgcatgtgtgaggcatttggtatgtatctgaattaattctcactaaaattcagcaaaggacttgatagcctctccccgccttttcaataaaggatgaatgaaggttg

SEQ ID NO: 860 - protein, 1371 aa, Homo sapien
AASASSTNLIHLSSKGHISPAKDTSLQQRTPAEMSPVLHFYVRPSGHEGAASGHTRRKLQGKLPELQGVETELCYNVNWTAEALPSAEETKKLMWLFGCPLLLDDVARESWLLPGSNDLLLEVGPRLNFSTPTSTNIVSVCRATGLGPVDRVETTRRYRLSFAHPPSAEVEAIALATLHDRMTEQHFPHPIQSFSPESMPEPLNGPINILGEGRLALEKANQELGLALDSWDLDFYTKRFQELQRNPSTVEAFDLAQSNSEHSRHWFFKGQLHVDGQKLVHSLFESIMSTQESSNPNNVLKFCDNSSAIQGKEVRFLRPEDPTRPSRFQQQQGLRHVVFTAETHNFPTGVCPFSGATTGTGGRIRDVQCTGRGAHVVAGTAGYCFGNLHIPGYNLPWEDLSFQYPGNFARPLEVAIEASNGASDYGNKFGEPVLAGFARSLGLQLPDGQRREWIKPIMFSGGIGSMEADHISKEAPEPGMEVVKVGGPVYRIGVGGGAASSVQVQGDNTSDLDFGAVQRGDPEMEQKMNRVIRACVEAPKGNPICSLHDQGAGGNGNVLKELSDPAGAIIYTSRFQLGDPTLNALEIWGAEYQESNALLLRSPNRDFLTHVSARERCPACFVGTITGDRRIVLVDDRECPVRRNGQGDAPPTPPPTPVDLELEWVLGKMPRKEFFLQRKPPMLQPLALPPGLSVHQALERVLRLPAVASKRYLTNKVDRSVGGLVAQQQCVGPLQTPLADVAVVALSHEELIGAATALGEQPVKSLLDPKVAARLAVAEALTNLVFALVTDLRDVKCSGNWMWAAKLPGEGAALADACEAMVAVMAALGVAVDGGKDSLSMAARVGTETVRAPGSLVISAYAVCPDITATVTPDLKHPEGRGHLLYVALSPGQHRLGGTALAQCFSQLGEHPPDLDLPENLVRAFSITQGLLKDRLLCSGHDVSDGGLVTCLLEMAFAGNCGLQVDVPVPRVDVLSVLFAEEPGLVLEVQEPDLAQVLKRYRDAGLHCLELGHTGEAGPHAMVRVSVNGAVVLEEPVGELRALWEETSFQLDRLQAEPRCVAEEERGLRERMGPSYCLPPTFPKASVPREPGGPSPRVAILREEGSNGDREMADAFHLAGFEVWDVTMQDLCSGAIGLDTFRGVAFVGGFSYADVLGSAKGWAAAVTFHPRAGAELRRFRKRPDTFSLGVCNGCQLLALLGWVGGDPNEDAAEMGPDSQPARPGLLLRHNLSGRYESRWASVRVGPGPALMLRGMEGAVLPVWSAHGEGYVAFSSPELQAQIEARGLAPLHWADDDGNPTEQYPLNPNGSPGGVAGICSCDGRHLAVMPHPERAVRPWQWAWRPPPFDTLTTSPWLQLSINARNWTLEGSC

SEQ ID NO: 861 - DNA, 4064 bp, Homo sapien; identical to SEQ ID NO: 158

SEQ ID NO: 862 - protein, 514 aa, Homo sapien [sequence omitted]

SEQ ID NO: 863 - DNA, 417 bp, Homo sapien
ttaatggtaggaatttgtattttttgcctttgttcagaatacatgacattggtaaatatgccacatgcctttggtggaagtacaactgttgttattactctatacaagtatgagatcagggttaggaaaaaaagacaaagaggtgatgacagacacacagtggaaaccccacatcgtctcatggcaaaccgaagaacgggatgtgggaagctcagcttcatttgactgcaaagtcccagggttttgttgcacatttgctcatgcacatgggtggtgggaggaaagggggatagcagagacacacagaagagggtacagggtgggtgagaaagaaagtagaagggctaatacccccaaagaacaaggccaactacacctggtgagcctcagagggacagaaacccaggaatgattcct

SEQ ID NO: 864 - DNA, 4288 bp, Homo sapien
cgaattcccccctcccctccccataacatgcccactgccccaaataaaaaaaaaaccaactatgggagagcagccgagacagcaactaggggcaggggaaagagacatggaactcgagggcagcggtgaagagaccatgcgtgtgctgggagggcccagaggcagcggcggcacaaacagcgcaggtacgagtctctgtgtcttccccggggttatgtataaatatagagagatgaggccttctctcccctgctctcccttccgctccgtgctgctcgccgcggtcccagctcctctttccacatgagggcgaagggaaggggggatgaacaagtcatcaccgaattgcaatcagacccacatccatcagcttctggatcttctgtgctattacaggattctttaagtgttcgctgagtgcctgctcctggggacaattcccttttcctttcttcagcctaacccgcggtggccctcgcggagtccggtcagccccggggagcgcaacccgggaggggcgtccaaggggcgtctcgcgtctgggaacggccgggcccccagcgggctgtggtcgcggggtgggggccggagcggcgaggccccccttaccgggctgcgcaggccgcccagggcccccgggctgagacggggccggagcggcgccccggccgcccgcgcggggtctcccccatggtgcagcggggttcgggatgtcgaagacgctgaagaagaagaagcactggctcagcaaggtgcaggagtgcgccgtgtcctgggccgggcccccgggcgacttcggcgcggagatccgcggtggcgcggagcgtggcgaattcccctacctggggcggctccgcgaagaacccggcgggggcacctgctgcatcgtctcgggcaaggcgcccaacccaagcgatgtgctgctggaggtaaacgggacgcctgtcagcgggctcaccaaccgggacaccctggctgtcatccgccacttccgcgagcccatccgtctcaagactgtgaaaccaggcaaagtcattaataaagatttgcggcattacctaagtcttcagtttcaaaaaggatcaattgaccacaaactgcagcaagtgatcagagataatctctacttgagaaccattccatgcactacaagggcccccagggatggagaagtaccaggagtggattataatttcatttccgttgaacagttcaaagcactggaggagagtggagcattgttagaaagtgggacatatgatggaaacttctatggaactcccaagcctccagcagaacccagcccttttcagccagatccagttgatcaagtcctctttgataatgagtttgatgcagaatctcaaagaaaacgaacgacatctgtcagcaagatggaaagaatggatagctctcttcctgaagaggaagaagatgaggacaagggagctattaatggcagtggaaacgcagaaaacagagagaggcattctgagtcatctgactggatgaagactgttccaagttacaaccaaacaaatagctccatggactttagaaattatatgatgagagatgagactctggaaccactgcccaaaaactgggaaatggcctacactgacacagggatgatctacttcattgaccacaataccaagacaaccacttggttggatcctcgtctttgtaagaaagccaaagcccctgaagactgtgaagatggagagcttccttatggctgggagaaaatagaggaccctcagtatgggacatactatgttgatttcactcttgtcgcccaagctggagtgcaatggcatgatctcggctcactgcaacctccgcctcctgggttcaatcaccttaaccagaaaacccagtttgaaaatccagtggaggaagccaaaaggaaaaagcagttaggacaggttgaaattgggtcttcaaaaccagatatggaaaaatcacacttcacaagagatccatcccagcttaaaggtgtccttgttcgagcatcactgaaaaaaagcacaatgggatttggttttactattattggtggagatagacctgatgagttcctacaagtgaaaaatgtgctgaaagatggtcccgcagctcaggatgggaaaattgcaccaggcgatgttattgtagacatcaatggcaactgtgtcttcggtcacactcatgcagatgttgtccagatgtttcaattggtacctgtcaatcagtatgtaaacctcactttatgtcgtggttatccacttcctgatgacagtgaagatcctgttgtggacattgttgctgctacccctgtcatcaatggacagtcattaaccaagggagagacttgcatgaatcctcaggattttaagccaggagcaatggttctggagcagaatggaaaatcgggacacacttcgactggtgatggtctcaatggaccatcagatgcaagtgagcagagagtatccatggcatcgtcaggcagctcccagcctgaactagtgactatccctttgattaagggccctaaagggtttgggtttgcaattgctgacagccctactggacagaaggtgaaaatgatactggatagtcagtggtgtcaaggccttcagaaagaagatataattaaggaaatataccatcaaaatgtgcagaatttaacacatctccaagtggtagaggtgctaaagcagtttccagtaggtgctgatgtaccattgcttatcttaagaggaggtcctccttcaacaaccaaaactgccaaaatgaaaacagataaaaaggaaaatgcaggaagtttggaggccataaatgagcctattcctcagcctatgccttttccaccgagcattatcaggtcaggatccccaaaattggatccttctgaggtctacctgaaatctaagactttatatgaagataaaccaccaaacaccaaagatttggatgtttttcttcgaaaacaagagtcagggtttggcttcagggtgctaggaggagatggacctgaccagtctatatatattggggctattattcccctgggagcagctgagaaagatggtcggctccgcgcagctgatgaactaatgtgcattgatggaattcctgttaaagggaaatcacacaaacaagtcttggacctcatgacaactgctgctcgaaatggccatgtgttactaactgtcagacggaagatcttctatggagaaaaacaacccgaggacgacagctctcaggccttcatttcaacacagaatggatctccccgcctgaaccgggcagaggtcccagccaggcctgcaccccaggagccctatgatgttgtcttgcaacgaaaagaaaatgaaggatttggctttgtcatcctcacctccaaaaacaaaccacctccaggagttattcctcataaaattggccgagtcatagaaggaagtccggctgaccgctgtggaaaactgaaagttggagatcatatctctgcagtgaatgggcagtccattgttgaactgtctcatgctaacattgttcagctgatcaaagatgctggtgtcaccgtcacactaacggtcattgctgaagaagagcatcatggtccaccatcaggaacaaactcagccaggcaaagcccagccctgcagcacaggcccatgggacagtcacaggccaaccacatacctggggacagaagtgccctagaaggtgaaattggaaaagatgtctccacttcttacagacattcttggtcagaccacaagcaccttgcacagcctgacaccgcagtaatttcagttgtaggcagtcggcacaatcagaaccttggttgttatccagtagagctggagagaggcccccggggctttggattcagcctccgaggggggaaggagtacaacatggggctgttcatccttcgtcttgctgaagatggtcctgccatcaaagatggcagaattcatgttggtgaccaaattgttgaaatcaatggggaacctacacaaggaatcacacatactcgagcaattgagctcattcaggctggtggaaataaagttcttcttcttttgaggccaggaactggcttgatacctgaccatggtttggctccttccggtctgtgctcctacgtgaaacccgagcaacattaaggctttcagggcttttcttggtctttccttaaaaagacttggtaaatttgcatgtcttgtaaatcactttcttcttttgttttcttttaaattaaaaatgatgctattaaataaaaaaaaaaaaa

SEQ ID NO: 865 - protein, 1150 aa, Homo sapien
MSKTLKKKKHWLSKVQECAVSWAGPPGDFGAEIRGGAERGEFPYLGRLREEPGGGTCCIVSGKAPNPSDVLLEVNGTPVSGLTNRDTLAVIRHFREPIRLKTVKPGKVINKDLRHYLSLQFQKGSIDHKLQQVIRDNLYLRTIPCTTRAPRDGEVPGVDYNFISVEQFKALEESGALLESGTYDGNFYGTPKPPAEPSPFQPDPVDQVLFDNEFDAESQRKRTTSVSKMERMDSSLPEEEEDEDKGAINGSGNAENRERHSESSDWMKTVPSYNQTNSSMDFRNYMMRDETLEPLPKNWEMAYTDTGMIYFIDHNTKTTTWLDPRLCKKAKAPEDCEDGELPYGWEKIEDPQYGTYYVDFTLVAQAGVQWHDLGSLQPPPPGFNHLNQKTQFENPVEEAKRKKQLGQVEIGSSKPDMEKSHFTRDPSQLKGVLVRASLKKSTMGFGFTIIGGDRPDEFLQVKNVLKDGPAAQDGKIAPGDVIVDINGNCVFGHTHADVVQMFQLVPVNQYVNLTLCRGYPLPDDSEDPVVDIVAATPVINGQSLTKGETCMNPQDFKPGAMVLEQNGKSGHTSTGDGLNGPSDASEQRVSMASSGSSQPELVTIPLIKGPKGFGFAIADSPTGQKVKMILDSQWCQGLQKEDIIKEIYHQNVQNLTHLQVVEVLKQFPVGADVPLLILRGGPPSTTKTAKMKTDKKENAGSLEAINEPIPQPMPFPPSIIRSGSPKLDPSEVYLKSKTLYEDKPPNTKDLDVFLRKQESGFGFRVLGGDGPDQSIYIGAIIPLGAAEKDGRLRAADELMCIDGIPVKGKSHKQVLDLMTTAARNGHVLLTVRRKIFYGEKQPEDDSSQAFISTQNGSPRLNRAEVPARPAPQEPYDVVLQRKENEGFGFVILTSKNKPPPGVIPHKIGRVIEGSPADRCGKLKVGDHISAVNGQSIVELSHANIVQLIKDAGVTVTLTVIAEEEHHGPPSGTNSARQSPALQHRPMGQSQANHIPGDRSALEGEIGKDVSTSYRHSWSDHKHLAQPDTAVISVVGSRHNQNLGCYPVELERGPRGFGFSLRGGKEYNMGLFILRLAEDGPAIKDGRIHVGDQIVEINGEPTQGITHTRAIELIQAGGNKVLLLLRPGTGLIPDHGLAPSGLCSYVKPEQH

SEQ ID NO: 866 - DNA, 2668 bp, Homo sapien
cccttccgtccttcattagacgtttgctcttgtcttagatgctcagatggtagtggataggcctgtgacgaaggtgctaccatcgtgagagtaagattatattctcctgccttttaaaaagatggacttcagcagaaatctttatgatattggggaacaactggacagtgaagatctggcctccctcaagttcctgagcctggactacattccgcaaaggaagcaagaacccatcaaggatgccttgatgttattccagagactccaggaaaagagaatgttggaggaaagcaatctgtccttcctgaaggagctgctcttccgaattaatagactggatttgctgattacctacctaaacactagaaaggaggagatggaaagggaacttcagacaccaggcagggctcaaatttctgcctacagggtcatgctctatcagatttcagaagaagtgagcagatcagaattgaggtcttttaagtttcttttgcaagaggaaatctccaaatgcaaactggatgatgacatgaacctgctggatattttcatagagatggagaagagggtcatcctgggagaaggaaagttggacatcctgaaaagagtctgtgcccaaatcaacaagagcctgctgaagataatcaacgactatgaagaattcagcaaaggggaggagttgtgtggggtaatgacaatctcggactctccaagagaacaggatagtgaatcacagactttggacaaagtttaccaaatgaaaagcaaacctcggggatactgtctgatcatcaacaatcacaattttgcaaaagcacgggagaaagtgcccaaacttcacagcattagggacaggaatggaacacacttggatgcaggggctttgaccacgacctttgaagagcttcattttgagatcaagccccacgatgactgcacagtagagcaaatctatgagattttgaaaatctaccaactcatggaccacagtaacatggactgcttcatctgctgtatcctctcccatggagacaagggcatcatctatggcactgatggacaggaggcccccatctatgagctgacatctcagttcactggtttgaagtgcccttcccttgctggaaaacccaaagtgttttttattcaggcttgtcagggggataactaccagaaaggtatacctgttgagactgattcagaggagcaaccctatttagaaatggatttatcatcacctcaaacgagatatatcccggatgaggctgactttctgctggggatggccactgtgaataactgtgtttcctaccgaaaccctgcagagggaacctggtacatccagtcactttgccagagcctgagagagcgatgtcctcgaggcgatgatattctcaccatcctgactgaagtgaactatgaagtaagcaacaaggatgacaagaaaaacatggggaaacagatgcctcagcctactttcacactaagaaaaaaacttgtcttcccttctgattgatggtgctattttgtttgttttgttttgttttgtttttttgagacagaatctcgctctgtcgcccaggctggagtgcagtggcgtgatctcggctcaccgcaagctccgcctcccgggttcacgccattctcctgcctcagcctcccgagtagctgggactacaggggcccgccaccacacctggctaattttttaaaaatatttttagtagagacagggtttcactgtgttagccagggtggtcttgatctcctgacctcgtgatccacccacctcggcctcccaaagtgctgggattacaggcgtgagccaccgcgcctggccgatggtactatttagatataacactatgtttatttactaattttctagattttctactttattaattgttttgcacttttttataagagctaaagttaaataggatattaacaacaataacactgtctcctttctcttatgcttaaggctttgggaatgtttttagctggtggcaataaataccagacacgtacaaaatccagctatgaatatagagggcttatgattcagattgttatctatcaactataagcccactgttaatattctattaactttaattctctttcaaagctaaattccacactaccacattaaaaaaattagaaagtagccacgtatggtggctcatgtctataatcccagcactttgggaggttgaggtgggaggatttgcttgaacccaagaggtccaaggctgcagtgagccatgttcacaccgctgcactcaagcttgggtgacagagcaagaccccgtccccaaaaaaattttttttttaataaaacaaaatttgtttgaaatcttttaaaaattcaaatgatttttacaagttttaaataagctctccccaaacttgctttatgccttcttattgcttttatgatatatatatgcttggctaactatatttgctttttgctaacaatgctctggggtctttttatgcatttgcatttgctctttcatctctgcttggattattttaaatcattaggaattaagttatctttaaaatttaagtatcttttttccaaaacattttttaatagaataaaatataatttgatcttaaaaaaaaaaaaaaaaaaaaaaaaaaaaaaaaaaaa

SEQ ID NO: 867 - protein, 235 aa, Homo sapien
MDFSRNLYDIGEQLDSEDLASLKFLSLDYIPQRKQEPIKDALMLFQRLQEKRMLEESNLSFLKELLFRINRLDLLITYLNTRKEEMERELQTPGRAQISAYRVMLYQISEEVSRSELRSFKFLLQEEISKCKLDDDMNLLDIFIEMEKRVILGEGKLDILKRVCAQINKSLLKIINDYEEFSKERSSSLEGSPDEFSNDFGQSLPNEKQTSGILSDHQQSQFCKSTGESAQTSQH

SEQ ID NO: 868 - DNA, 431 bp, Homo sapien
  Unsure 421: Unknown base
aagctaaataaatatagctttattcatctttcagagattgccatttagcctagaaaattacatcaaaagatgaactgatttttgcttgaaaaagtcaaccatgtttaattgctcacacaattttaattacaacagatgtaatttctaatatataccattcgatcacacaccatttttatgttctggagtgagacctgggagtattttgcttaagactttctcattctctaaaactagctttggcagttaacaatgtggagaattcagcacaaaaagcaccctagcccagcctttttattttatttttttaaatctctatttaacccttcaaagtttcctttgcagccatatgcatttctaggtggctctacctgtagaaggctgcactttccaagcggcgagggactttaattctcacttnccaccactcc

SEQ ID NO: 869 - DNA, 2306 bp, Homo sapien
ggcacgagggaggtctgcatgaaggggatcccctacatcgcagcctaccagaaggaactggctcattcccagccggcggtgcagccccggctcaagctgctcctgatggggcataaggctgcaggaaagactttgctgcgccactgcctcaccgaggagagagtggagggatgcccaggaggaggggacaaggagaagtgctacccaccgtcacctccccctgtgagcaagggcatcgaggtgaccagctggacggccgatgcctcccggggcctgcggttcatcgtgtatgacttagctggggatgaaagttatgaggtgatccagcccttcttcctgtccccaggggccctatacgtgctggtggtcaacttggccacctatgagcctcgccactttcctaccaccgtgggctccttcttgcatcgggtcggggcgagagtgccccacgcggtggtgtgcatcgtgggcacccacgcagacctgtgcggagagcgtgagctggaggagaaatgtctggacattcaccgccagatcgccctgcaggagaagcacgacgcggagggactgagccgcttggccaaggtggtggacgaggcactggcccgggacttcgagctgcgctctgccagcccccacgcagcctactatggcgtttcggacaagaaccttcgacggcgcaaggcccattttcaatacctgctcaaccaccggctgcagatcctctcccccgtgttgcctgttagctgcagggacccgcgccacttacgacgccttcgggacaagttgctgtcagttgctgagcaccgagagatcttccccaacttacacagagtactgcctcgatcctggcaggtgctggaggaactgcatttccagccacctcaggcccagcgactgtggctaagctggtgggactcggcgcgcttgggcctgcaggcgggtctgaccgaggaccgactgcagagtgccctctcctacctgcatgagagcggcaagctactctactttgaggacagtccggctctcaaggagcacgtcttccacaacctcacccgcctcatcgacatcctcaatgtcttcttccagagggatccctctttgctgctgcataagctgctcctagggaccagtggagagggcaaggcggagggggaaagctccccgcccatggcgcggtccacccccagccaggaactgctccgggccacccagctccatcagtatgtggagggctttctgttgcatgggctcttgccagctcatgtcattcggttgctgcttaagcctcatgtccaggcccagcaggacttgcagctgttgctggagctgctggagaagatgggactctgttactgcctcaataaacccaagggcaagcctttgaatgggtccacagcttggtacaagttcccatgctatgtgcagaacgaggtgccccatgcagaagcctggattaatgggaccaacctagctgggcagtcttttgtggctgagcagttgcagattgaatatagctttccttttacttttccacctgggttgtttgcacgctacagtgtccagatcaacagccatgtggtgcacaggtcggatggtaaatttcagatctttgcctatagagggaaagttcctgtggttgtgagttacagacctgccaggggagtcctgcagccagacaccctgtccattgctagccatgcatcattaccaaatatatggaccgcatggcaagccataacccccttggtggaggaactgaatgtcctacttcaggaatggcctggactgcactacaccgtgcacattctctgttctaagtgccttaagagaggatcgcccaatccacatgcttttccaggggagttgctgagtcagcccagaccggaaggagtggcagagatcatttgccccaagaacggcagcgagcgagtaaatgttgccttggtttacccacccacgccgactgtgatcagcccctgttccaagaagaatgttggtgaaaagcacagaaaccagtgacgtttgtggctgtggaatttccatggagaaaagagagcatctgaacacctggaccatcttttgcacctggcagaccctctgcactcaccccagcgtgttctgtgaacttgagtgacaacgcgtgcttgcagggtgctttttggatgactggggaagaggtggggagggggtggtggggggaagcatggacgagaacatggagcaaatgttttacaacctgaacctcagaactgtgatcctccaaggagcgcgctacttgaagaaaaaaaaaaaaaaaaaaaaaa

SEQ ID NO: 870 - DNA, 1648 bp, Homo sapien
atgcgggagatcgtgcacatccaggccggccagtgcggcaaccagatcggggccaagttctgggaagtcatcagtgatgagcatggcatcgaccccagcggcaactacgtgggcgactcggacttgcagctggagcggatcagcgtctactacaacgaggcctcttctcacaagtacgtgcctcgagccattctggtggacctggaacccggaaccatggacagtgtccgctcaggggcctttggacatctcttcaggcctgacaatttcatctttggtcagagtggggccggcaacaactgggccaagggtcactacacggagggggcggagctggtggattcggtcctggatgtggtgcggaaggagtgtgaaaactgcgactgcctgcagggcttccagctgacccactcgctggggggggggacgggctccggcatgggcacgttgctcatcagcaaggtgcgtgaggagtatcccgaccgcatcatgaacaccttcagcgtcgtgccctcacccaaggtgtcagacacggtggtggaaccctacaacgccacgctgtccatccaccagctggtggaaaacacggatgaaacctactgcatcgacaacgaggcgctctacgacatctgcttccgcaccctcaagctggccacgcccacctacggggacctcaaccacctggtatcggccaccatgagcggagtcaccacctccttgcgcttcccgggccagctcaacgctgacctgcgcaagctggccgtcaacatggtgcccttcccgcgcctgcacttcttcatgcccggcttcgcccccctcaccaggcggggcagccagcagtaccgggccctgaccgtgcccgagctcacccagcagatgttcgatgccaagaacatgatggccgcctgcgacccgcgccacggccgctacctgacggtggccaccgtgttccggggccgcatgtccatgaaggaggtggacgagcagatgctggccatccagagcaagaacagcagctacttcgtggagtggatccccaacaacgtgaaggtggccgtgtgtgacatcccgccccgcggcctcaagatgtcctccaccttcatcgggaacagcacggccatccaggagctgttcaagcgcatctccgagcagttcacggccatgttccggcgcaaggccttcctgcactggtacacgggcgagggcatggacgagatggagttcaccgaggccgagagcaacatgaacgacctggtgtccgagtaccagcagtaccaggacgccacggccgaggaagagggcgagatgtacgaagacgacgaggaggagtcggaggcccagggccccaagtgaaactgctcgcagctggagtgagaggcaggtggcggccggggccgaagccagcagtgtctaaacccccggagccatcttgctgccgacaccctgctttccccatcgccctagggctcccttgccgccctcctgcagtatttatggcctcgtcctcccccacctaggccacgtgtgagctgctcctgtctctgtcttattgcagctccaggcctgacgttttacggttttgttttttactggtttgtgtttatattttcggggatacttaataaatctattgctgtcagataccctt

SEQ ID NO: 871 - protein, 450 aa, Homo sapien
MREIVHIQAGQCGNQIGAKFWEVISDEHGIDPSGNYVGDSDLQLERISVYYNEASSHKYVPRAILVDLEPGTMDSVRSGAFGHLFRPDNFIFGQSGAGNNWAKGHYTEGAELVDSVLDVVRKECENCDCLQGFQLTHSLGGGTGSGMGTLLISKVREEYPDRIMNTFSVVPSPKVSDTVVEPYNATLSIHQLVENTDETYCIDNEALYDICFRTLKLATPTYGDLNHLVSATMSGVTTSLRFPGQLNADLRKLAVNMVPFPRLHFFMPGFAPLTRRGSQQYRALTVPELTQQMFDAKNMMAACDPRHGRYLTVATVFRGRMSMKEVDEQMLAIQSKNSSYFVEWIPNNVKVAVCDIPPRGLKMSSTFIGNSTAIQELFKRISEQFTAMFRRKAFLHWYTGEGMDEMEFTEAESNMNDLVSEYQQYQDATAEEEGEMYEDDEEESEAQGPK

SEQ ID NO: 872 - DNA, 2277 bp, Homo sapien; identical to SEQ ID NO: 634

SEQ ID NO: 873 - protein, 574 aa, Homo sapien; identical to SEQ ID NO: 635

SEQ ID NO: 874 - DNA, 2268 bp, Homo sapien
  Unsure 2120-2139: Unknown base
ggcgccattttgctggagcctgcgaccgagtgggagtggagtggagcggctgtggttgccgactctttcctcttccccacggtccagtcagcgggttaattaggccatcggccctcgagccgagacttgtctcttatttagttctggggagcgcctcgtcgacatgagtgatgtggaggaaaacaacttcgagggcagagtgagtacaaagccgcgggagccgtctaggcggcggcccaatgctcggggtttcacgggaacaagcgcggtcgggcggggttgcgggtagtcccgcgaggagcaacctctggagccatcgcgattgattcctcccatcccaagatggcttctgggttccactccttccccaaacaccacggataacacccctcccccttttttggaggctgactgatacctggacttctgggtcctcttccctccccgcccccgcattgcttcctcccttctccccacccctgaggcttccttatgtctgctccgaggtgtgggtccccgtcgcggttgggcgggaggaggcggcagggagctcccctccgtccggatagtggtaggtgcttcctgcggtggcatttctggcgaccccgagcatcgtagagggtctcgggatcgaaagtgcgcggggctgctttccgggcggggagaagctggcgtgggactagctggggcctgtgtctccttggctctctatttcagtgagcggccgcgtctctgttggaaccggcggcgttgcgtctaaaaaggcgaaagccttgaggttgaaggtgggacgagcctaatgaagtggttagtcaacgaccgcaccgacccttaagcgttcttaagacgagagctgtgaggggaaactacgcaaggagcccttttcccttaatgtcccttcgactttcctttcacttcgaaatgaatgtggaaatgctgtcacgccttatttttctaattcctcgatgttgggttttttctcttctttatatctcaacttttaatgctcttcttcctatgacctttcatctaaaaactgaccactcctttacaggtttttacggtaaaaaaaaaaaaatcggtctttctttaatcttacatagctgaacgaattcattggctcagtatttttaagataactagtcagtatatactgttctgtaacttaaaagatgacctgaaaattaacaggccctctcccatttctcttctcactctatcccccaccgaagagggctcagaaaaaagtttttattaatatatttggggtcggagaaatacaaacatcacaaagaatacgatatccccagcttaaatgtactggaacgtttgtcagtgagtttcatttccaaagtttaccctacatagggaattgtagaagtgagttagtagaagtgagttcgtgtgaaaccctggaaagaaaacaaaagccccatgcaacacgttccgggctgttgtgtagatgtttattctagtcactaggggaagcacataaaaacacctgaggtgtgtgtgctgaagggcgaattttgtccttttggggagttcatgatataaacatctagaaccaaaaagtcaaatcagaaggtcagtttaggctttagttctctttgaggaaagatttaaagcaatagactataatagttacccggtagactaaaaaatttgcctttaattcttttgattggaatttttttttacaaagtttggagcatggaaacaaatgaaaattgaacctgcttattttttaggatggtgtattgatggccccaacagaactttctaaaatcatgcgataaacatatatgatagtagttgtaaaatgcttcttgttttgaaaatgttgagtaattatcgatagaaattttgctgtccattcatacattccttcaattaactttcattgttaaaaaattgggggattgatgtttggtttggtttgtggggagtgaagaggactactggagggaccttgtttgcttgctttttttctttttttaatttatcatcaagtctaggaaaggagtaagttgccgacaattgtcacttttccctcctaagaaagtaacatgttaagattcccacctaccagcctgggtgacagtgagactcccgtctcnnnnnnnnnnnnnnnnnnnnttcccacccacttttaagctaaagtatatgtaggcattaaagatttatttaatagaaataaagggccctcttacggccctttgtggtcataggaaatatttttttcacaagtggtacccaagtgtattt

SEQ ID NO: 875 - protein, 54 aa, Homo sapien
RHFAGACDRVGVEWSGCGCRLFPLPHGPVSGLIRPSALEPRLVSYLVLGSASST

SEQ ID NO: 876 - DNA, 487 bp, Homo sapien
ccgccgccgccatctgagggaggtaccctggaaaccaccttttatcggtggggaagtgcagtcgcggtgggcggctctgggggccagcgaaacgggaggcctctaaatctttaggttggggctgcattgccctggagccgcactcttgagtccgaggccatcttttgttggagaaggcgtcggcgttggcgttttcccgaggttgggctgtacagtgtctccgtccgcggaaaaagaagcctctgaacccgcgccggcccgcagcccccgtgccttccggccgctgctcgccgtcgccagaggctaggccacgtttcccccagtgccgaggtgtttctgtgaccctccctccactcccattcccttctgaaagggcacctgctcttggtgagaaaagaaattatagcacgaagagccagtatcagaagagtatccatcacccgcagcaaccgctcagggaacaccatcaaaaaaaaaaaaaaaaaaa

SEQ ID NO: 877 - DNA, 1626 bp, Homo sapien
ctcgactcttagcttgtcggggacggtaaccgggacccggtgtctgctcctgtcgccttcgcctcctaatccctagccactatgcgtgagtgcatctccatccacgttggccaggctggtgtccagattggcaatgcctgctgggagctctactgcctggaacacggcatccagcccgatggccagatgccaagtgacaagaccattgggggaggagatgactccttcaacaccttcttcagtgagacgggcgctggcaagcacgtgccccgggctgtgtttgtagacttggaacccacagtcattgatgaagttcgcactggcacctaccgccagctcttccaccctgagcagctcatcacaggcaaggaagatgctgccaataactatgcccgagggcactacaccattggcaaggagatcattgaccttgtgttggaccgaattcgcaagctggctgaccagtgcaccggtcttcagggcttcttggttttccacagctttggtgggggaactggttctgggttcacctccctgctcatggaacgtctctcagttgattatggcaagaagtccaagctggagttctccatttacccagcaccccaggtttccacagctgtagttgagccctacaactccatcctcaccacccacaccaccctggagcactctgattgtgccttcatggtagacaatgaggccatctatgacatctgtcgtagaaacctcgatatcgagcgcccaacctacactaaccttaaccgccttattagccagattgtgtcctccatcactgcttccctgagatttgatggagccctgaatgttgacctgacagaattccagaccaacctggtgccctacccccgcatccacttccctctggccacatatgcccctgtcatctctgctgagaaagcctaccatgaacagctttctgtagcagagatcaccaatgcttgctttgagccagccaaccagatggtgaaatgtgaccctcgccatggtaaatacatggcttgctgcctgttgtaccgtggtgacgtggttcccaaagatgtcaatgctgccattgccaccatcaaaaccaagcgcagcatccagtttgtggattggtgccccactggcttcaaggttggcatcaactaccagcctcccactgtggtgcctggtggagacctggccaaggtacagagagctgtgtgcatgctgagcaacaccacagccattgctgaggcctgggctcgcctggaccacaagtttgacctgatgtatgccaagcgtgcctttgttcactggtacgtgggtgaggggatggaggaaggcgagttttcagaggcccgtgaagatatggctgcccttgagaaggattatgaggaggttggtgtggattctgttgaaggagagggtgaggaagaaggagaggaatactaattatccattccttttggccctgcagcatgtcatgctcccagaatttcagcttcagcttaactgacagacgttaaagctttctggttagattgttttcacttggtgatcatgtcttttccatgtgtacctgtaatatttttccatcatatctcaaagtaaagtcattaacatcaaaaaaaaaaaaaaaaa

SEQ ID NO: 878 - protein, 451 aa, Homo sapien [sequence omitted]

SEQ ID NO: 879 - DNA, 2379 bp, Homo sapien
ggcacgaggcagtagctcccgttgcggcggcacccgtggcagccctggcggacgcaggagcgatggcagcgaccgatatagctcgccaggtgggtgaaggttgccgaactgtccccctggctggacatgtggggtttgacagcttgcctgaccagctggtgaataagtccgtcagccagggcttctgcttcaacatcctgtgcgtgggagagacaggtttgggcaagtccaccctcatggacaccctgttcaacaccaaattcgaaggggagccagccacccacacacagccgggtgtccagctccagtctaatacctatgacctccaagagagcaacgtgaggctaaagctcacgatcgttagcacagttggctttggggaccagatcaacaaagaggacagctacaagcctatcgtggaattcatcgatgcacaattcgaggcctacctgcaggaagagctaaagatccgaagagtgctacacacctaccatgactcccgaatccatgtctgcttgtatttcattgcccccacgggtcattccctgaagtctctggacctagtgactatgaagaagctggacagtaaggtgaacatcatccccatcattgccaaagcagatgccatttcgaagagtgagctaacaaagttcaaaatcaaaatcaccagcgagcttgtcagcaacggagtccagatctatcagtttcctacagatgatgagtcggtggcagagatcaatggaaccatgaacgcccacctgccgtttgctgtcattggcagcacagaagaactgaagataggcaacaagatgatgagggcgcggcagtatccttggggcactgtgcaggttgaaaacgaggcccactgcgactttgtgaagctgcgggagatgctgattcgggtcaacatggaggatctgcgggagcagacccacacccggcactatgagctgtatcgccgctgtaagctggaggagatgggcttcaaggacaccgaccctgacagcaaacccttcagtttacaggagacatatgaggccaaaaggaacgagttcctaggggaactccagaaaaaagaagaggagatgagacagatgttcgtccagcgagtcaaagagaaagaagcggagctcaaagaggcagagaaagagctgcacgagaagtttgaccgtctgaagaaactgcaccaggacgagaagaagaaactggaggataagaagaaatccctggatgatgaagtgaatgctttcaagcaaagaaagacggcggctgagctgctccagtcccagggctcccaggctggaggctcacagactctgaagagagacaaagagaagaaaaactttttttaatcttgtcttcagcagctgcactaagtctaaaggagaagactgccattatagaagagttagggttccatattgtctcaaatcagaaatcaaccaatttcctctcccctcaaactgcaagcacacacacatacaccacaccactcaacaagtgttcatgtgtccctgtgtccaggcaagaagctctcttcctgactcacatggtattttaaatggaagtgtcttgtcctaactaacaaggcaggaaaagaaccatcagagctggaaaatggacgaaatgtaacctcagagaaacaactacaggaccactcacccaagtgtaagtgactggggcaggacacctcagctgtgggtatgaaagtactgttctgttcacaaggttttgtttgagttttatgtttttcttttaaacatttctctggttcgatgggttgactgtctacagccactgttaaacatttctgaatatgcaagagaaagtcaagtgacatttgtatcttcttcagcattcgcagaccttctatagattccagcaaagggggaaaatgtatccactatctaacacttaggtagagaagggagggggtttaagcttagtgagggcaaaattactccattccaccttccgagaccagttagggttttgagagaggtttctgctcaacctgggatctggagggagagctttgatgttggtaaatctgccttgaattcattggtttaacttgcatcaaaataccatgtgagtgtgctcattctcatatatcccctaccaccatcaccaccattctgctgttcagtgtctcttgagagagcctctttgcatgttttccagaatctgtgtgtgtttttcctttcttctcctttgttctttttgctcaaaggtgtgaccagtcattgcccctctggggctttcattctccaggagaaacatcccagaaccagcactgtttagcctgatacctttctaatgtccatgtcaattttcaataaaattcaaagaaatgctaaaaaaaaaaaaaaaaaaaaa

SEQ ID NO: 880 - protein, 429 aa, Homo sapien
MAATDIARQVGEGCRTVPLAGHVGFDSLPDQLVNKSVSQGFCFNILCVGETGLGKSTLMDTLFNTKFEGEPATHTQPGVQLQSNTYDLQESNVRLKLTIVSTVGFGDQINKEDSYKPIVEFIDAQFEAYLQEELKIRRVLHTYHDSRIHVCLYFIAPTGHSLKSLDLVTMKKLDSKVNIIPIIAKADAISKSELTKFKIKITSELVSNGVQIYQFPTDDESVAEINGTMNAHLPFAVIGSTEELKIGNKMMRARQYPWGTVQVENEAHCDFVKLREMLIRVNMEDLREQTHTRHYELYRRCKLEEMGFKDTDPDSKPFSLQETYEAKRNEFLGELQKKEEEMRQMFVQRVKEKEAELKEAEKELHEKFDRLKKLHQDEKKKLEDKKKSLDDEVNAFKQRKTAAELLQSQGSQAGGSQTLKRDKEKKNFF

SEQ ID NO: 881 - DNA, 2795 bp, Homo sapien; identical to SEQ ID NO: 122

SEQ ID NO: 882 - protein, 900 aa, Homo sapien; identical to SEQ ID NO: 123

SEQ ID NO: 883 - DNA, 1577 bp, Homo sapien; identical to SEQ ID NO: 605

SEQ ID NO: 884 - protein, 445 aa, Homo sapien; identical to SEQ ID NO: 606

SEQ ID NO: 885 - DNA, 2711 bp, Homo sapien
caggagaagctgaccagccgcaagatggacagccgctggggcgggcgcagcgagtccatcaatgtgaccctcaacgtggagcaggcagcctacacccgtgatgccctggccaaggggctctatgcccgcctcttcgacttcctcgtggaggccatcaaccgtgctatgcagaaaccccaggaagagtacagcatcggtgtgctggacatttacggcttcgagatcttccagaaaaatggcttcgagcagttttgcatcaacttcgtcaatgagaagctgcagcaaatctttatcgaacttaccctgaaggccgagcaggaggagtatgtgcaggaaggcatccgctggactccaatccagtacttcaacaacaaggtcgtctgtgacctcatcgaaaacaagctgagccccccaggcatcatgagcgtcttggacgacgtgtgcgccaccatgcacgccacgggcgggggagcagaccagacactgctgcagaagctgcaggcggctgtggggacccacgagcatttcaacagctggagcgccggcttcgtcatccaccactacgctggcaaggtctcctacgacgtcagcggcttctgcgagaggaaccgagacgttctcttctccgacctcatagagctgatgcagtccagtgaccaggccttcctccggatgctcttccccgagaagctggatggagacaagaaggggcgccccagcaccgccggctccaagatcaagaaacaagccaacgacctggtggccacactgatgaggtgcacaccccactacatccgctgcatcaaacccaacgagaccaagcacgcccgagactgggaggagaacagagtccagcaccaggtggaatacctgggcctgaaggaaaacatcagggtgcgcagagccggcttcgcctaccgccgccagttcgccaaattcctgcagaggtatgccattctgacccccgagacgtggccgcggtggcgtggggacgaacgccagggcgtccagcacctgcttcgggcggtcaacatggagcccgaccagtaccagatggggagcaccaaggtctttgtcaagaacccagagtcgcttttcctcctggaggaggtgcgagagcgaaagttcgatggctttgcccgaaccatccagaaggcctggcggcgccacgtggctgtccggaagtacgaggagatgcgggaggaagcttccaacatcctgctgaacaagaaggagcggaggcgcaacagcatcaatcggaacttcgtcggggactacctggggctggaggagcggcccgagctgcgtcagttcctgggcaagaaggagcgggtggacttcgccgattcggtcaccaagtacgaccgccgcttcaagcccatcaagcgggacttgatcctgacgcccaagtgtgtgtatgtgattgggcgagagaagatgaagaagggacctgagaaaggtccagtgtgtgaaatcttgaagaagaaattggacatccaggctctgcggggggtctccctcagcacgcgacaggacgacttcttcatcctccaagaggatgccgccgacagcttcctggagagcgtcttcaagaccgagtttgtcagccttctgtgcaagcgcttcgaggaggcgacgcggaggcccctgcccctcaccttcagcgacacactacagtttcgggtgaagaaggagggctggggcggtggcggcacccgcagcgtcaccttctcccgcggcttcggcgacttggcagtgctcaaggttggcggtcggaccctcacggtcagcgtgggcgatgggctgcccaagaactccaagcctaccggaaagggattggccaagggtaaacctcggaggtcgtcccaagcccctacccgggcggcccctggcgccccccaaggcatggatcgaaatggggcccccctctgcccacaggggggggccccctgccccctggagaaattcatttggcccagggggcacccacaggcctccccggccctccgtccacatccctgggatgccagcagacgaccccgggcacgtccgccctcagagcacaacacagaattcctcaacgtgcctgaccaggggatggccggcatgcagaggaagcgcagcgtggggcaacggccagtgcctgtgggccgacccaagccccagcctcggacacatggtcccaggtgccgggccctataccagtacgtgggccaagatgtggacgagctgagcttcaacgtgaacgaggtcattgagatcctcatggaagatccctcgggctggtggaagggccggcttcacggccaggagggccttttcccaggaaactacgtggagaagatctgagctgggccctgggatactgccttctctttcgcccgcctatctgcctgccggcctggtggggagccaggccctgccaatgaaagcctcgtttacctgggctgcaatagcctaaaagtccaatcctttggcctccagtccttgcccaggccctgggtcaccaggtcactggtgcagcccccgcccctgggccctggttttcctccaacatcacacctgctgcccattgtccaaaactgtgtgtgtcaaaggggactaacagcagaatttacctcccaactgccatgtgattaagaaatgggtcttgagtcctgtgctgttggcaaagttccaggcacagttggggagggggggccggaatccgc

SEQ ID NO: 886 - DNA, 1073 bp, Homo sapien; identical to SEQ ID NO: 249

SEQ ID NO: 887 - protein, 230 aa, Homo sapien [sequence omitted]

SEQ ID NO: 888 - DNA, 1870 bp, Homo sapien
gaattcggcacgaggatgacggagccgggcgcctctcccgaggacccttgggtcaaggtggagtatgcctacagcgacaacagcctggaccccgggctttttgtagaaagcacccgcaaggggagtgtagtgtccagagctaatagcatcggttccaccagtgcctcttctgtccccaacacagatgatgaggacagtgattaccaccaggaggcctacaaggagtcctacaaagaccggcggcggcgcgcacacactcaggctgagcagaagaggagggacgccatcaagagaggctatgatgaccttcagaccatcgtccccacttgccagcagcaggacttctccattggctcccaaaagctcagcaaagccatcgttctacaaaagaccattgactacattcagtttttgcacaaggagaagaaaaagcaggaggaggaggtgtccacgttacgcaaggatgtcaccgccctaaagatcatgaaagtgaactatgagcagattgtgaaggcacaccaggacaacccccatgaaggggaggaccaggtctctgaccaggtcaagttcaacgtgtttcaaggcatcatggtttccctgttccagtccttcaatgcctccatctcagtggccagcttccaggagctgtcagcgtgtgtcttcagctggatcgaggagcactgtaagcctcagaccctgcgggagattgtgattggcgtcctgcaccaattgaaaaaccagctttactgaccggttcttggaaacctggagaacagccaacaagaggcccttgaatctctacgtggccactgaactgctgggcccgggagactggtctacaacaccacacactggacagctggtctctacttggtgtgtggtttctcccagccccattttctctacagcggagccgcggtgtgtgttgtgtgaaagcttctgattaatttattatattgacgataaaactcaaacctacccagccttccccccactccatggaagtccttgggatgggcgtctgctctggacaccccaaagagctcctgccctctcagccctttattcaagcctcagatttctgctcatgatctacatagatttggaaactgttttcctctgttgtggtctcttgggcaacatttgtggcccaagtttgggcaacatttggcccaagtttgggcattgtgggagtagctgtatgggagaaaaagagtaagaggaaatattcccacagccatgaagggtgaaagggcaccttgtgcctagactagggctggctggtcagtcccaggtgaggacaagggctttctggccatctcagggagggggcaccaggttcctcccctcaccccatattccatcaccttcctcctctgctctgggtggtaagggaagccctcccggttcccacaggctatgatgctgcatggcagaggcaggtataacacagcactacatattggaaattttttatttttctaaataccaatgcagttttgctacggttacaattttgaaatattaactgagcctcaaaatcaccctttctgtcaagcatatcttggcctctcccatgtctcagtgttgcctgcatttctcccaggacttgggggtggggtgaaaagcgtacaaaagatacttaaaagggctcctggggtacacaagcccagcaggtcctgagtgaagccgtgggccctccaaatgctcgttttatagcaacctctctctaccctagttctccaaattcacttctgccttcctcaggtttgatatctggcaggtttgactatccagaggaaattaaatatttttatataaaattaaattataataaatattgccaaatgctaaaaaaaaaaaaaaaaaa

SEQ ID NO: 889 - protein, 244 aa, Homo sapien
MTEPGASPEDPWVKVEYAYSDNSLDPGLFVESTRKGSVVSRANSIGSTSASSVPNTDDEDSDYHQEAYKESYKDRRRRAHTQAEQKRRDAIKRGYDDLQTIVPTCQQQDFSIGSQKLSKAIVLQKTIDYIQFLHKEKKKQEEEVSTLRKDVTALKIMKVNYEQIVKAHQDNPHEGEDQVSDQVKFNVFQGIMVSLFQSFNASISVASFQELSACVFSWIEEHCKPQTLREIVIGVLHQLKNQLY

SEQ ID NO: 890 - DNA, 360 bp, Homo sapien
atggtgaaaatgacaaagtccaaaactttccaagcgtatctgccgaactgtcaccgaacgtacagctgtatccactgcagagcacacctggccaatcatgacgagctcatctccaagtcctttcaggggagccagggacgcgcctacctcttcaattccgtggtgaacgtgggctgcggccctgcagaggagagggtccttctcaccgggctgcatgcggttgccgacatctactgcgagaactgcaagaccacgctcgggtggaaatacgagcatgcctttgagagcagtcagaaatataaggaaggaaaattcatcattgagcttgctcatatgatcaaagacaatggctgggagtaa

SEQ ID NO: 891 - protein, 119 aa, Homo sapien
MVKMTKSKTFQAYLPNCHRTYSCIHCRAHLANHDELISKSFQGSQGRAYLFNSVVNVGCGPAEERVLLTGLHAVADIYCENCKTTLGWKYEHAFESSQKYKEGKFIIELAHMIKDNGWE

SEQ ID NO: 892 - DNA, 1280 bp, Homo sapien; identical to SEQ ID NO: 277

SEQ ID NO: 893 - protein, 178 aa, Homo sapien; identical to SEQ ID NO: 278

SEQ ID NO: 894 - DNA, 2454 bp, Homo sapien
ggaataggttagtttcagacaagcctgcttgccggagctcagcagacaccaggccttccgggcaggcctggcccaccgtgggcctcagagctgctgctggggcattcagaaccggctctccattggcattgggaccagagaccccgcaagtggcctgtttgcctggacatccacctgtacgtccccaggtttcgggaggcccaggggcgatgccagaccccgcggcgcacctgcccttcttctacggcagcatctcgcgtgccgaggccgaggagcacctgaagctggcgggcatggcggacgggctcttcctgctgcgccagtgcctgcgctcgctgggcggctatgtgctgtcgctcgtgcacgatgtgcgcttccaccactttcccatcgagcgccagctcaacggcacctacgccattgccggcggcaaagcgcactgtggaccggcagagctctgcgagttctactcgcgcgaccccgacgggctgccctgcaacctgcgcaagccgtgcaaccggccgtcgggcctcgagccgcagccgggggtcttcgactgcctgcgagacgccatggtgcgtgactacgtgcgccagacgtggaagctggagggcgaggccctggagcaggccatcatcagccaggccccgcaggtggagaagctcattgctacgacggcccacgagcggatgccctggtaccacagcagcctgacgcgtgaggaggccgagcgcaaactttactctggggcgcagaccgacggcaagttcctgctgaggccgcggaaggagcagggcacatacgccctgtccctcatctatgggaagacggtgtaccactacctcatcagccaagacaaggcgggcaagtactgcattcccgagggcaccaagtttgacacgctctggcagctggtggagtatctgaagctgaaggcggacgggctcatctactgcctgaaggaggcctgccccaacagcagtgccagcaacgcctcaggggctgctgctcccacactcccagcccacccatccacgttgactcatcctcagagacgaatcgacaccctcaactcagatggatacacccctgagccagcacgcataacgtccccagacaaaccgcggccgatgcccatggacacgagcgtgtatgagagcccctacagcgacccagaggagctcaaggacaagaagctcttcctgaagcgcgataacctcctcatagctgacattgaacttggctgcggcaactttggctcagtgcgccagggcgtgtaccgcatgcgcaagaagcagatcgacgtggccatcaaggtgctgaagcagggcacggagaaggcagacacggaagagatgatgcgcgaggcgcagatcatgcaccagctggacaacccctacatcgtgcggctcattggcgtctgccaggccgaggccctcatgctggtcatggagatggctgggggcgggccgctgcacaagttcctggtcggcaagagggaggagatccctgtgagcaatgtggccgagctgctgcaccaggtgtccatggggatgaagtacctggaggagaagaactttgtgcaccgtgacctggcggcccgcaacgtcctgctggttaaccggcactacgccaagatcagcgactttggcctctccaaagcactgggtgccgacgacagctactacactgcccgctcagcagggaagtggccgctcaagtggtacgcacccgaatgcatcaacttccgcaagttctccagccgcagcgatgtctggagctatggggtcaccatgtgggaggccttgtcctacggccagaagccctacaagaagatgaaagggccggaggtcatggccttcatcgagcagggcaagcggatggagtgcccaccagagtgtccacccgaactgtacgcactcatgagtgactgctggatctacaagtgggaggatcgccccgacttcctgaccgtggagcagcgcatgcgagcctgttactacagcctggccagcaaggtggaagggcccccaggcagcacacagaaggctgaggctgcctgtgcctgagctcccgctgcccaggggagccctccacgccggctcttccccaccctcagccccaccccaggtcctgcagtctggctgagccctgcttggttgtctccacacacagctgggctgtggtagggggtgtctcaggccacaccggccttgcattgcctgcctggccccctgtcctctctggctggggagcagggaggtccgggagggtgcggctgtgcagcctgtcctgggctggtggctcccggagggccctgagctgagggcattgcttacacggatgccttcccctgggccctgacattggagcctgggcatcctcaggtggtcaggcgtagatcaccagaataaacccagcttccctcttgaaaaaaaaaaaaaaaaaaaaacc

SEQ ID NO: 895 - DNA, 2186 bp, Homo sapien; identical to SEQ ID NO: 554

SEQ ID NO: 896 - protein, 283 aa, Homo sapien; identical to SEQ ID NO: 555

SEQ ID NO: 897 - DNA, 2122 bp, Homo sapien
ggcacgaggccgagttgcgatgctgtacttctctttgttttgggcggctcggcctctgcagagatgtgggcagctggtcaggatggccattcgggctcagcacagcaacgcagcccagactcagactggggaagcaaacaggggctggacaggccaggagagcctgtcggacagtgatcctgagatgtgggagttgctgcagagggagaaggacaggcagtgtcgtggcctggagctcattgcctcagagaacttctgcagccgagctgcgctggaggccctggggtcctgtctgaacaacaagtactcggagggttatcctggcaagagatactatgggggagcagaggtggtggatgaaattgagctgctgtgccagcgccgggccttggaagcctttgacctggatcctgcacagtggggagtcaatgtccagccctactccgggtccccagccaacctggccgtctacacagcccttctgcaacctcacgaccggatcatggggctggacctgcccgatgggggccatctcacccacggctacatgtctgacgtcaagcggatatcagccacgtccatcttcttcgagtctatgccctataagctcaaccccaaaactggcctcattgactacaaccagctggcactgactgctcgacttttccggccacggctcatcatagctggcaccagcgcctatgctcgcctcattgactacgcccgcatgagagaggtgtgtgatgaagtcaaagcacacctgctggcagacatggcccacatcagtggcctggtggctgccaaggtgattccctcgcctttcaagcacgcggacatcgtcaccaccactactcacaagactcttcgaggggccaggtcagggctcatcttctaccggaaaggggtgaaggctgtggaccccaagactggccgggagatcccttacacatttgaggaccgaatcaactttgccgtgttcccatccctgcaggggggcccccacaatcatgccattgctgcagtagctgtggccctaaagcaggcctgcacccccatgttccgggagtactccctgcaggttctgaagaatgctcgggccatggcagatgccctgctagagcgaggctactcactggtatcaggtggtactgacaaccacctggtgctggtggacctgcggcccaagggcctggatggagctcgggctgagcgggtgctagagcttgtatccatcactgccaacaagaacacctgtcctggagaccgaagtgccatcacaccgggcggcctgcggcttggggccccagccttaacttctcgacagttccgtgaggatgacttccggagagttgtggactttatagatgaaggggtcaacattggcttagaggtgaagagcaagactgccaagctccaggatttcaaatccttcctgcttaaggactcagaaacaagtcagcgtctggccaacctcaggcaacgggtggagcagtttgccagggccttccccatgcctggttttgatgagcattgaaggcacctgggaaatgaggcccacagactcaaagttactctccttccccctacctgggccagtgaaatagaaagcctttctattttttggtgcgggagggaagacctctcacttagggcaagagccaggtatagtctcccttcccagaatttgtaactgagaagatcttttctttttcctttttttggtaacaagacttagaaggagggcccaggcactttctgtttgaacccctgtcatgatcacagtgtcagagacgcgtcctctttcttggggaagttgaggagtgcccttcagagccagtagcaggcaggggtgggtaggcaccctccttcctgtttttatctaataaaatgctaacctgccctgagtttccattactgtgggtggggttcccctgggccaaacagtgatttgtctccctcaatgtgtacaccgctccgctcccaccaccgctaccacaaggacccccggggctgcagcctcctctttctgtctctgatcagagccgacaccagacgtgattagcaggcgcagcaaattcaatttgttaaatgaaattgtattttgaaaaaaaaaaaaaaaaaa

SEQ ID NO: 898 - protein, 504 aa, Homo sapien
MLYFSLFWAARPLQRCGQLVRMAIRAQHSNAAQTQTGEANRGWTGQESLSDSDPEMWELLQREKDRQCRGLELIASENFCSRAALEALGSCLNNKYSEGYPGKRYYGGAEVVDEIELLCQRRALEAFDLDPAQWGVNVQPYSGSPANLAVYTALLQPHDRIMGLDLPDGGHLTHGYMSDVKRISATSIFFESMPYKLNPKTGLIDYNQLALTARLFRPRLIIAGTSAYARLIDYARMREVCDEVKAHLLADMAHISGLVAAKVIPSPFKHADIVTTTTHKTLRGARSGLIFYRKGVKAVDPKTGREIPYTFEDRINFAVFPSLQGGPHNHAIAAVAVALKQACTPMFREYSLQVLKNARAMADALLERGYSLVSGGTDNHLVLVDLRPKGLDGARAERVLELVSITANKNTCPGDRSAITPGGLRLGAPALTSRQFREDDFRRVVDFIDEGVNIGLEVKSKTAKLQDFKSFLLKDSETSQRLANLRQRVEQFARAFPMPGFDEH

SEQ ID NO: 899 - DNA, 3373 bp, Homo sapien
ggcacgaggctctacaatctgtggcctcagcccttgccaactctgcctcttcccccgctgactgggcctctgcagagatgtgggcagctggtcaggatggccattcgggctcagcacagcaacgcagcccagactcagactggggaagcaaacaggggctggacaggccaggagagcctgtcggacagtgatcctgagatgtgggagttgctgcagagggagaaggacaggcagtgtcgtggcctggagctcattgcctcagagatactatgggggagcagaggtggtggatgaaattgagctgctgtgccagcgccgggccttggaagcctttgacctggatcctgcacagtggggagtcaatgtccagccctactccgggtccccagccaacctggccgtctacacagcccttctgcaacctcacgaccggatcatggggctggacctgcccgatgggggccatctcacccacggctacatgtctgacgtcaagcggatatcagccacgtccatcttcttcgagtctatgccctataagctcaacggctttagctgtttgtgtgtctgtccagcccaaaactggcctcattgactacaaccagctggcactgactgctcgacttttccggccacggctcatcatagctggcaccagcgcctatgctcgcctcattgactacgcccgcatgagagaggtgtgtgatgaagtcaaagcacacctgctggcagacatggcccacatcagtggcctggtggctgccaaggtgattccctcgcctttcaagcacgcggacatcgtcaccaccactactcacaagactcttcgaggggccaggtcagggctcatcttctaccggaaaggggtgaaggctgtggaccccaagactggccgggagatcccttacacatttgaggaccgaatcaactttgccgtgttcccatccctgcaggggggcccccacaatcatgccattgctgcagtagctgtggccctaaagcaggcctgcacccccatgttccgggagtactccctgcaggttctgaagaatgctcgggccatggcagatgccctgctagagcgaggctactcactggtatcaggtggtactgacaaccacctggtgctggtggacctgcggcccaagggcctggatggagctcgggctgagcgggtgctagagcttgtatccatcactgccaacaagaacacctgtcctggagaccgaagtgccatcacaccgggcggcctgcggcttggggccccagccttaacttctcgacagttccgtgaggatgacttccggagagttgtggactttatagatgaaggggtcaacattggcttagaggtgaagagcaagactgccaagctccaggatttcaaatccttcctgcttaaggactcagaaacaagtcagcgtctggccaacctcaggcaacgggtggagcagtttgccagggccttccccatgcctggttttgatgagcattgaaggcacctgggaaatgaggcccacagactcaaagttactctccttccccctacctgggccagtgaaatagaaagcctttctattttttggtgcgggagggaagacctctcacttagggcaagagccaggtatagtctcccttcccagaatttgtaactgagaagatcttttctttttcctttttttggtaacaagacttagaaggagggcccaggcactttctgtttgaacccctgtcatgatcacagtgtcagagacgcgtcctctttcttggggaagttgaggagtgcccttcagagccagtagcaggcaggggtgggtaggcaccctccttcctgtttttatctaataaaatgctaacctgccctgagtttccattactgtgggtggggttcccctgggccaaacagtgaaaaaaaaaaaaaaaaaaaactcgagactagttctctcctgaaaactggagggccttcaaggctctcatcgctgctcagtacagcggggctcaggtccgcgtgctctccgcaccaccccacttccattttggccaaaccaaccgcacccctgaatttctccgcaaatttcctgccggcaaggtcccagcatttgagggtgatgatggattctgtgtgtttgagagcaacgccattgcctactatgtgagcaatgaggagctgcggggaagtactccagaggcagcagcccaggtggtgcagtgggtgagctttgctgattccgatatagtgcccccagccagtacctgggtgttccccaccttgggcatcatgcaccacaacaaacaggccactgagaatgcaaaggaggaagtgaggcgaattctggggctgctggatgcttacttgaagacgaggacttttctggtgggcgaacgagtgacattggctgacatcacagttgtctgcaccctgttgtggctctataagcaggttctagagccttctttccgccaggcctttcccaataccaaccgctggttcctcacctgcattaaccagccccagttccgggctgtcttgggcgaagtgaaactgtgtgagaagatggcccagtttgatgctaaaaagtttgcagagacccaacctaaaaaggacacaccacggaaagagaagggttcacgggaagagaagcagaagccccaggctgagcggaaggaggagaaaaaggcggctgcccctgctcctgaggaggagatggatgaatgtgagcaggcgctggctgctgagcccaaggccaaggaccccttcgctcacctgcccaagagtacctttgtgttggatgaatttaagcgcaagtactccaatgaggacacactctctgtggcactgccatatttctgggagcactttgataaggacggctggtccctgtggtactcagagtatcgcttccctgaagaactcactcagaccttcatgagctgcaatctcatcactggaatgttccagcgactggacaagctgaggaagaatgccttcgccagtgtcatcctttttggaaccaacaatagcagctccatttctggagtctgggtcttccgaggccaggagcttgcctttccgctgagtccagattggcaggtggactacgagtcatacacatggcggaaactggatcctggcagcgaggagacccagacgctggttcgagagtacttttcctgggagggggccttccagcatgtgggcaaagccttcaatcagggcaagatcttcaagtgaacatctcttgccatcacctagctgcctgcacctgcccttcagggagatgggggtcattaaaggaaactgaacattgaaaaaaaaaaaaaaaaaaaaaaaaaaaaaaaaaaaaaaaaaaaaaaaaaaaaaaaaaaaaaaaaa

SEQ ID NO: 900 - protein, 317 aa, Homo sapien [sequence omitted]

SEQ ID NO: 901 - DNA, 5316 bp, Homo sapien
  Unsure 3623-3650: Unknown base
caagccaattatggctccctttcccaatggtagtttgtgaatggctttaattcgccaggatcttataaaacaaatgctgctgctatgaatatgggtcgaccattccaaaaaaatcgtgtgaagcctcagtttaggtcatctggtggttcagaacactcaacagagggctctgtatccttgggggatggacagttgaacagatatagttcaagaaactttccagctgaacggcataaccccacagtaactgggcatcaggagcaaacttaccttcagaaggagacttccactttgcaggtggaacagaatggggactatggtaggggcaggagaactctcttcagaggtcgaagacgacgagaagatgacaggatctcaagacctcatccttcaacagctgaatcaaaggctccaacaccaaagtttgacttattagcctcaaattttccacctttacctggaagttcatcaagaatgccaggtgaactcgtttggagaataggatgtctgatgttgttaaaggtgtctacaaagaaaaggataatgaagagttgacaattagttgcccagtgcctgcagatgagcagacagaatgcacttctgcccagcaactcaatatgagtaccagttctccatgtgctgctgagcttactgcattaagcacaactcagcaagaaaaggatctaatagaagattcctctgttcagaaggatggtctcaatcagacaactataccagtttctcctccaagtactacaaagccatcgagggcaagtactgcttcaccatgtaataataacataaatgcagctacagctgtggctctacaggaaccccgaaagttaagttatgctgaagtgtgccagaagccccctaaagagccatcttcagttcttgtgcagccactacgggaacttcgctccaatgtggtgtctcccaccaaaaatgaagacaatggagctcctgagaactccgttgagaaaccacatgagaagccagaagcaagggctagtaaggattattctggcttccgaggcaatataatccccaggggagcagcaggaaaaatcagggaacagagacgccagtttagccatagggctatacctcagggagtgactcgacgtaatggcaaagagcaatatgtgccacccagatcaccaaagtaaaaaacaacaaaactattcaaaaacttcactctcttcccattaaacttgaactgtggctatattgaactgttttggaggggagggggtagccaggaaggaaacaagagaaagtacgtccatttcattatggattttggagttgtgagtgataggatcccaaaattcatctctaatgtggtttttaaatgctggaggattccaatcaatataaatatatatatatatatacacacacatatataaaaagtataatttttctatttttgtttttggttttaatttgcagagatttgctgccaggaatcaattttgagggttcagatttagcttggaagaaaaaaaagaaacatacatccttcagtataggagatgagggaatgagagaaaatattttttgaagaagcatttctgtaaaattagaaattactttttttaatctatttaaagtttggcttgaagaatgccatctctgactatatggccttgtattgcaaagcagatcagtggctggggtgcctgttgtgggtgtgagtgtgtacaagagcgattgaagccaaatctgttgtcatgttagtaaatgatttgaaaactgaatgtaatacttgagtagatttttttttctagtttgaaatttagtctgtctttttgaccttactaatatttcatttaacaagttgtaaaactctgattgtacttagagatgtgactaccaatcagtttgatactcaaggaaagggggttattcaagaaattgaaaatttcatcttggacctcagtgcatcggtcaaatggatttcagaggtttaaacttccctgtgattccccctgaatacccccaaaatgagaaacaaaattttttttcttactccatttgttactctctgttctttgactgcccacccacagaaaagcaaaataaccaactacctactcaattgtgtgtttgtaattgctttgagcagtctagtcaaatcatataaattgttctaaatttcagaattgaacattgaagtattaactcttctgttcacacatttagaattttagctcccaagatggtagggcagactgaccgtacagtaatttatttgtcgttagtgttaaagattaagcatagtaactgactcttaagtgttaaataatgtagaagtaaaaaaattttttttaaaggcttaatttgggaggggggacttatttctgtttacagtgtattaccttccttccctcctcttctccccccacacccaacaaaatacagtttggaattcactgaaacagtaccagcaagtcatgagattttttagtaaagatgagaaagatggttgaagaaaattagtgcataatttctcagtgaataaagttgtagctctcatatactaaatagacaagtttacatgctgttatttagaaaatgactaaaatattaaaaaccgtgttgtgttaatctgttttaagtcataccatgttcagagttctatgtaaggtgggttttatttttcttttaagggatagtttgtaatagtaagaactgtcccatatgttagtaaattacatatgtacaaattgaaactgtaaattgtgaacactggaaagcaccattgtgacatagagtaaacatcttagtaatatattaaagtgaatgtaaatggtggttaaaattacattactgtgaaattcatcttccaactctaagttaagctttggagatacatgttagtggttaactgttaagagctttgaaaacactgcacatatctgtacaagccagaattactatttctttgacttattattagcttggcagttgcttttgatttgattgttttatgacatggtatactactatatttactcagtttgaaactattcatttctacacactatttttaaaaattgcctactaggtgaaacataacaataaaactacctgtgctgaaatttgggggaagtttaggtcctttaaaaaaacatattaatcattgactacatctatgataaaagtgcttattttggtttactaagataatgcagttggtggaaatgataaacgttttaagtgttaacatcctttgaatgcgttggatttcagagaataaacattttgtaaaaatcacttggtaaggattataaacttaattactgcacttaaaatgaaacattactttttttaaacaatgtgtcacaaatgtaggtctgtattacttgtatgcttgtgtgacttactgttagtccagctctaaaaatttaaaggttgtaattgaaatacaagaaaagagccttcttttagaagaaagcaagtatatttttgcttttacttcaaatgttatttaaagtagaaatttaatttgtagatataacctttaaaaattttctcattaagacaatgtttttaatttaatttgcctcattacatctaatagttcccatttgatggcatgtatagggaagagtgannnnnnnnnnnnnnnnnnnnnnnnnnnnaatatttatatatattcacagtatgtatttagcatttattttattacagcagatttaaagtttgtatctaaataatgcctatgagttgtgtgaagctcttggcttttttccaacgttactttgtaactaatgagggtggatgttcattgtagtttatttatttggttctttagatggaggaatttaaaaaatcaaatttttctcttcacctttatgacttgacatttccttgatctgttggaggctaaaagtaggtataaatgatattgaatgttgggtatagtgatactctgccatagttcttactgcatgaagagaacaagagtcacacaagttcaccactttgcacttcatagagaaggtacatagagacattgcaaaacctgtctccatttgctatcctgataattaaggttttcataatacctagggcctgtctctgagtaattttaattttgccaaatacactgacatttaaaatagtgatccatctaaatttttttcagctgggttttgaggaatataagagctttcaatgataaaggtttgttgtagttgtcttatgtgctgaatttgcagatgatcagatgctgtgcagaattctgatttatttttgtttcctaaaattaagatagcttgaatattatttcacattcctttttcttttttaaataaacaggtttgctttggaaaggcttaatgatggaatgttagcatcttcactagggtaaagaagaacaaaaagaatgttgctggaacgtaaaatagtatttaaaagttaatgaacacttctctagttttcttagttatggccttaataattagtctcttggcttaaatgtccactggttttactttgacacagttgaacaacactggggttaagtctctggtatttaggctggcaatatatatattaaccatattttaaaagtaccaattttgtttttacagaaaagataaaactcaaaagagaacagtgtattccttctgaggggcttttataaattattaactataatatatgatggattttttcctaattttttatatttccttacaattttggtggccattaatttaactttaggcttttgggcatatgctagtctgagcttccgaaaagatacatatatgtttcccttttcattagctgaatgaggatattttaagaagttgaaagagaatttattttcaagttgtgagtaaatcctcctttgaaattcacctgattattagataacttaaagtttatttttaaaagctgacaactttttatgaatcttcgagttgacagttcctaaaagcgtaactcagatattaatgggctgtgtattaaatggttttattttcagttttgcagcacagaacactgttgaaatatccatatcaacttgatttttttaacctaattcaggtgtcctttgcatctcttaaatgttgggggtgggggtcagagccagttatccggcttctgttttgtcgattgcttagatttgttcctgttgtcaaaactgttacccccaaaattggtgtgacacatgctcatgcataaaatgttaaaatgagtacatccttgtatttgtatttgttttcaacatcgccaaggtgctatgggaaattaacaaaattagaaaaaaaataaaattattaaaaagcagaaaaa

SEQ ID NO: 902 - protein, 360 aa, Homo sapien
MNMGRPFQKNRVKPQFRSSGGSEHSTEGSVSLGDGQLNRYSSRNFPAERHNPTVTGHQEQTYLQKETSTLQVEQNGDYGRGRRTLFRGRRRREDDRISRPHPSTAESKAPTPKFDLLASNFPPLPGSSSRMPGELVWRIGCLMLLKVSTKKRIMKSTISCPVPADEQTECTSAQQLNMSTSSPCAAELTALSTTQQEKDLIEDSSVQKDGLNQTTIPVSPPSTTKPSRASTASPCNNNINAATAVALQEPRKLSYAEVCQKPPKEPSSVLVQPLRELRSNVVSPTKNEDNGAPENSVEKPHEKPEARASKDYSGFRGNIIPRGAAGKIREQRRQFSHRAIPQGVTRRNGKEQYVPPRSPK

SEQ ID NO: 903 - DNA, 3145 bp, Homo sapien
aaaagggaagcctgcaacaagttaagctgaagaccgaagcaagagctggttcagcctgccagtggagacactgggcccggcatccaggatggacccagaatctgagagagccctgcaggcccctcacagcccctccaagacagatgggaaagaattagctgggaccatggatggagaagggacgctcttccagactgaaagccctcagtctggcagcattctaacagaggagactgaggtcaagggcaccctggaaggtgatgtttgtggtgtggagcctcctggcccaggagacacagtagtccagggagacctgcaggagaccaccgtggtgacaggcctgggaccagacacacaggacctggaaggccagagccctccacagagcctgccttcaacccccaaagcagcttggttcagggaggagggccgctgctccagcagtgacgatgacaccgacgtggacatggagggtctgcggagacggcggggccgggaggccggcccacctcagcccatggtgcccctggctgtggagaaccaggctgggggtgagggtgcaggcggggagctgggcatctccctcaacatgtgcctccttggggccctggttctgcttggcctgggggtcctcctcttctcaggtggcctctcagagtctgagactgggcccatggaggaagtggagcggcaggtcctcccagaccccgaggtgctggaagctgtgggggacaggcaggatgggctaagggaacagctgcaggccccagtgcctcctgacagtgtccccagcctgcaaaacatgggtcttctgctggacaagctggccaaggagaaccaggacatccggctgctgcaggcccagctgcaggcccaaaaggaagagcttcagagcctgatgcaccagcccaaagggctagaggaggagaatgcccagctccggggggctctgcagcagggcgaagccttccagcgggctctggagtcagagctgcagcagctgcgggcccggctccaggggctggaggccgactgtgtccggggcccagatggggtgtgcctcagtggggatagaggcccacagggtgacaaggccatcagggagcaaggccccagggagcaggagccagaactcagcttcccgaagcagaaggaacagctggaggctgaggcacaggcattaaggcaagagttagagaggcagcgacggctgctggggtctgtacagcaggatctggagaggagcttgcaggatgccagccgcggggacccagctcatgctggcttggctgagctgggccacagattggcccagaaactgcagggcctggagaactggggccaggaccctggggtctctgccaatgcctcaaaggcctggcaccagaagtcccacttccagaattctagggagtggagtggaaaggaaaagtggtgggatgggcagagagaccggaaggctgagcactggaaacataagaaggaagaatctggccgggaaaggaagaagaactggggaggtcaggaggacagggagccagcaggaaggtggaaggagggcaggccaagggtggaggagtcggggagcaagaaggagggcaagcgacagggcccgaaggaacccccaaggaaaagtggtagcttccactcctctggagaaaagcagaagcaacctcggtggagggaagggactaaggacagccatgaccccctgccatcctgggcagagctgttgaggcccaagtaccgggcaccccagggctgctcaggtgtggacgagtgtgcccggcaggagggcctgactttctttggcacagagctagccccagtgcggcaacaggagctggcctctctgctaagaacatacttggcacggctgccctgggctgggcagctgaccaaggagctacccctctcacctgctttctttggtgaggatggcatcttccgtcatgaccgcctccgcttccgggattttgtggatgccctggaggacagcttggaggaggtggctgtgcaacagacaggtgatgatgatgaagtagatgactttgaggacttcatcttcagccacttctttggagacaaagcactgaagaagaggtcagggaagaaggacaagcactcacagagcccaagagctgcggggcccagggaggggcacagccatagccaccaccaccaccaccggggctgacaccctgccccacagggaatggccttggcctggcccagcccaagatcccagcgttatctaactcctggagggtggactctgtcctggcttgtttggtgtcctcagatatctttcacacagtagagcaaaatcaccagccctgcactgatgtcactttatgtagaaaaaggccttagctggacctgtgttgccgtctatgcaaatgcatgcaaatactccaggccctgggatgtgggcttgtgttttgtcactgtgaagggggagatgggagaggagcctgttttggggtggggtctggggaaggcaatctgattctgaagctaaagagctttcatcctcttgagtgtatgtccccatagtgggccccttgacccacatgctgaccggtgccttgggatttgactagagttgctggctcgaggcccagcacgaggacttaccctggggttttgttaggtttggaagcagctgtccctagggggtgaagtcccccccctttttttttttacccctgcttctcccacggcttcacctccctatgtgaactgtagactcagatcccaataaagtgctgttgcagctatgatgctaggtggtttctaagcacaggggacaccccacaccccctgcctgaatggatgggtccatcccaggcactggtacttgcccccttgttctgtatccccctttgcccttgccttgcccttccaacaaaccctaggcccttgagaagctgatacttctccttttgctcacagctgccttggccccacccctgggagatgtagcaaattgagtgtgggttttggagtctgagcctcaggctcaaatccaggccaagtgatcttgggcaagttaatctctggggactttgggtttcttatcctcaaaaaaggcgatggaagggctggggaagtgattaaataaaagcaacgcaagaaaaatgcc

SEQ ID NO: 904 - protein, 702 aa, Homo sapien [sequence omitted]

SEQ ID NO: 905 - DNA, 1084 bp, Homo sapien
cgaggatgtgcgtgggggctcggcggctgggccgcgggccgtgtgcggctctgctcctcctgggcctggggctgagcaccgtgacggggctccactgtgtcggggacacctaccccagcaacgaccggtgctgccacgagtgcaggccaggcaacgggatggtgagccgctgcagccgctcccagaacacggtgtgccgtccgtgcgggccgggcttctacaacgacgtggtcagctccaagccgtgcaagccctgcacgtggtgtaacctcagaagtgggagtgagcggaagcagctgtgcacggccacacaggacacagtctgccgctgccgggcgggcacccagcccctggacagctacaagcctggagttgactgtgccccctgccctccagggcacttctccccaggcgacaaccaggcctgcaagccctggaccaactgcaccttggctgggaagcacaccctgcagccggccagcaatagctcggacgcaatctgtgaggacagggaccccccagccacgcagccccaggagacccagggccccccggccaggcccatcactgtccagcccactgaagcctggcccagaacctcacagggaccctccacccggcccgtggaggtccccgggggccgtgcggttgccgccatcctgggcctgggcctggtgctggggctgctgggccccctggccatcctgctggccctgtacctgctccggagggaccagaggctgccccccgatgcccacaagccccctgggggaggcagtttccggacccccatccaagaggagcaggccgacgcccactccaccctggccaagatctgacctgggcccaccaaggtggacgctgggccccgccaggctggagcccggagggtctgctgggcgagcagggcaggtgcaggccgcctgccccgccacgctcctgggccaactctgcaccgttctaggtgccgatggctgcctccggctctctgcttacgtatgccatgcatacctcctgccccgcgggaccacaataaaaaccttggcagacgggagtctccgaccggcaaaaaaaaaaaaaaaaa

SEQ ID NO: 906 - protein, 277 aa, Homo sapien
MCVGARRLGRGPCAALLLLGLGLSTVTGLHCVGDTYPSNDRCCHECRPGNGMVSRCSRSQNTVCRPCGPGFYNDVVSSKPCKPCTWCNLRSGSERKQLCTATQDTVCRCRAGTQPLDSYKPGVDCAPCPPGHFSPGDNQACKPWTNCTLAGKHTLQPASNSSDAICEDRDPPATQPQETQGPPARPITVQPTEAWPRTSQGPSTRPVEVPGGRAVAAILGLGLVLGLLGPLAILLALYLLRRDQRLPPDAHKPPGGGSFRTPIQEEQADAHSTLAKI

SEQ ID NO: 907 - DNA, 2017 bp, Homo sapien
atgaccaaagctgatctcataaataatttgggaaccattgccaagtctggtactaaagcattcatggaggctcttcaggctggtgcagacatctccatgattgggcagtttggtgttggcttttattctgcctacttggtggcagagaaagtggttgtgatcacaaagcacaacgatgatgaacagtatgcttgggagtcttctgctggaggttccttcactgtgcgtgctgaccatggtgagcccattggcaggggtaccaaagtgatcctccatcttaaagaagatcagacagagtacctagaagagaggcgggtcaaagaagtagtgaagaagcattctcagttcataggctatcccatcaccctttatttggagaaggaacgagagaaggaaattagtgatgatgaggcagaggaagagaaaggtgagaaagaagaggaagataaagatgatgaagaaaagcccaagatcgaagatgtgggttcagatgaggaggatgacagcggtaaggataagaagaagaaaactaagaagatcaaagagaaatacattgatcaggaagaactaaacaagaccaagcctatttggaccagaaaccctgatgacatcacccaagaggagtatggagaattctacaagagcctcactaatgactgggaagaccacttggcagtcaagcacttttctgtagaaggtcagttggaattcagggcattgctatttattcctcgtcgggctccctttgacctttttgagaacaagaagaaaaagaacaacatcaaactctatgtccgccgtgtgttcatcatggacagctgtgatgagttgataccagagtatctcaattttatccgtggtgtggttgactctgaggatctgcccctgaacatctcccgagaaatgctccagcagagcaaaatcttgaaagtcattcgcaaaaacattgttaagaagtgccttgagctcttctctgagctggcagaagacaaggagaattacaagaaattctatgaggcattctctaaaaatctcaagcttggaatccacgaagactccactaaccgccgccgcctgtctgagctgctgcgctatcatacctcccagtctggagatgagatgacatctctgtcagagtatgtttctcgcatgaaggagacacagaagtccatctattacatcactggtgagagcaaagagcaggtggccaactcagcttttgtggagcgagtgcggaaacggggcttcgaggtggtatatatgaccgagcccattgacgagtactgtgtgcagcagctcaaggaatttgatgggaagagcctggtctcagttaccaaggagggtctggagctgcctgaggatgaggaggagaagaagaagatggaagagagcaaggcaaagtttgagaacctctgcaagctcatgaaagaaatcttagataagaaggttgagaaggtgacaatctccaatagacttgtgtcttcaccttgctgcattgtgaccagcacctacggctggacagccaatatggagcggatcatgaaagcccaggcacttcgggacaactccaccatgggctatatgatggccaaaaagcacctggagatcaaccctgaccaccccattgtggagacgctgcggcagaaggctgaggccgacaagaatgataaggcagttaaggacctggtggtgctgctgtttgaaaccgccctgctatcttctggcttttcccttgaggatccccagacccactccaaccgcatctatcgcatgatcaagctaggtctaggtattgatgaagatgaagtggcagcagaggaacccaatgctgcagttcctgatgagatcccccctctcgagggcgatgaggatgcgtctcgcatggaagaagtcgattaggttaggagttcatagttggaaaacttgtgcccttgtatagtgtccccatgggctcccactgcagcctcgagtgcccctgtcccacctggctccccctgctggtgtctagtgttttttt

SEQ ID NO: 908 - protein, 632 aa, Homo sapien
MTKADLINNLGTIAKSGTKAFMEALQAGADISMIGQFGVGFYSAYLVAEKVVVITKHNDDEQYAWESSAGGSFTVRADHGEPIGRGTKVILHLKEDQTEYLEERRVKEVVKKHSQFIGYPITLYLEKEREKEISDDEAEEEKGEKEEEDKDDEEKPKIEDVGSDEEDDSGKDKKKKTKKIKEKYIDQEELNKTKPIWTRNPDDITQEEYGEFYKSLTNDWEDHLAVKHFSVEGQLEFRALLFIPRRAPFDLFENKKKKNNIKLYVRRVFIMDSCDELIPEYLNFIRGVVDSEDLPLNISREMLQQSKILKVIRKNIVKKCLELFSELAEDKENYKKFYEAFSKNLKLGIHEDSTNRRRLSELLRYHTSQSGDEMTSLSEYVSRMKETQKSIYYITGESKEQVANSAFVERVRKRGFEVVYMTEPIDEYCVQQLKEFDGKSLVSVTKEGLELPEDEEEKKKMEESKAKFENLCKLMKEILDKKVEKVTISNRLVSSPCCIVTSTYGWTANMERIMKAQALRDNSTMGYMMAKKHLEINPDHPIVETLRQKAEADKNDKAVKDLVVLLFETALLSSGFSLEDPQTHSNRIYRMIKLGLGIDEDEVAAEEPNAAVPDEIPPLEGDEDASRMEEVD

SEQ ID NO: 909 - DNA, 575 bp, Homo sapien
actcttctggtccccacagactcagagagaacccaccatggtgctgtctcctgccgacaagaccaacgtcaaggccgcctggggtaaggtcggcgcgcacgctggcgagtatggtgcggaggccctggagaggatgttcctgtccttccccaccaccaagacctacttcccgcacttcgacctgagccacggctctgcccaggttaagggccacggcaagaaggtggccgacgcgctgaccaacgccgtggcgcacgtggacgacatgcccaacgcgctgtccgccctgagcgacctgcacgcgcacaagcttcgggtggacccggtcaacttcaagctcctaagccactgcctgctggtgaccctggccgcccacctccccgccgagttcacccctgcggtgcacgcctccctggacaagttcctggcttctgtgagcaccgtgctgacctccaaataccgttaagctggagcctcggtagccgttcctcctgcccgctgggcctcccaacgggccctcctcccctccttgcaccggcccttcctggtctttgaataaagtctgagtgggcggc

SEQ ID NO: 910 - protein, 142 aa, Homo sapien
MVLSPADKTNVKAAWGKVGAHAGEYGAEALERMFLSFPTTKTYFPHFDLSHGSAQVKGHGKKVADALTNAVAHVDDMPNALSALSDLHAHKLRVDPVNFKLLSHCLLVTLAAHLPAEFTPAVHASLDKFLASVSTVLTSKYR

SEQ ID NO: 911 - DNA, 3111 bp, Homo sapien; identical to SEQ ID NO: 350

SEQ ID NO: 912 - protein, 938 aa, Homo sapien; identical to SEQ ID NO: 351

SEQ ID NO: 913 - DNA, 3571 bp, Homo sapien
ggcacgaggttccgagttgcgatgctgtacttctctttgttttgggcggctcggcctctgcagagatgtgggcagctggtcaggatggccattcgggctcagcacagcaacgcagcccagactcagactggggaagcaaacaggggctggacaggccaggagagcctgtcggacagtgatcctgagatgtgggagttgctgcagagggagaaggacaggcagtgtcgtggcctggagctcattgcctcagagaacttctgcagccgagctgcgctggaggccctggggtcctgtctgaacaacaagtactcggagggttatcctggcaagagatactatgggggagcagaggtggtggatgaaattgagctgctgtgccagcgccgggccttggaagcctttgacctggatcctgcacagtggggagtcaatgtccagccctactccgggtccccagccaacctggccgtctacacagcccttctgcaacctcacgaccggatcatggggctggacctgcccgatgggggccatctcacccacggctacatgtctgacgtcaagcggatatcagccacgtccatcttcttcgagtctatgccctataagctcaaccccaaaactggcctcattgactacaaccagctggcactgactgctcgacttttccggccacggctcatcatagctggcaccagcgcctatgctcgcctcattgactacgcccgcatgagagaggtgtgtgatgaagtcaaagcacacctgctggcagacatggcccacatcagtggcctggtggctgccaaggtgattccctcgcctttcaagcacgcggacatcgtcaccaccactactcacaagactcttcgaggggccaggtcagggctcatcttctaccggaaaggggtgaaggctgtggaccccaagactggccgggagatcccttacacatttgaggaccgaatcaactttgccgtgttcccatccctgcaggggggcccccacaatcatgccattgctgcagtagctgtggccctaaagcaggcctgcacccccatgttccgggagtactccctgcaggttctgaagaatgctcgggccatggcagatgccctgctagagcgaggctactcactggtatcaggtggtactgacaaccacctggtgctggtggacctgcggcccaagggcctggatggagctcgggctgagcgggtgctagagcttgtatccatcactgccaacaagaacacctgtcctggagaccgaagtgccatcacaccgggcggcctgcggcttggggccccagccttaacttctcgacagttccgtgaggatgacttccggagagttgtggactttatagatgaaggggtcaacattggcttagaggtgaagagcaagactgccaagctccaggatttcaaatccttcctgcttaaggactcagaaacaagtcagcgtctggccaacctcaggcaacgggtggagcagtttgccagggccttccccatgcctggttttgatgagcattgaaggcacctgggaaatgaggcccacagactcaaagttactctccttccccctacctgggccagtgaaatagaaagcctttctattttttggtgcgggagggaagacctctcacttagggcaagagccaggtatagtctcccttcccagaatttgtaactgagaagatcttttctttttcctttttttggtaacaagacttagaaggagggcccaggcactttctgtttgaacccctgtcatgatcacagtgtcagagacgcgtcctctttcttggggaagttgaggagtgcccttcagagccagtagcaggcaggggtgggtaggcaccctccttcctgtttttatctaataaaatgctaacctgcaaaaaaaaaaaaaaaaaaaaaaaaaatcagactaggtggactctgcctgcctacctggtctgggaagatgttctaccatatctccctagagcacgaaatcctgctgcacccgcgctacttcggccccaacttgctcaacacggtgaagcagaagctcttcaccgaggtggaggggacctgcacagggaagtgagtgtcgagctcaccgcaccgccagatcgttcgatgcgcacacggggcgctatacctgcaacccctccccaactcctactcgtcctgccacccactctggggacccctctcctctctcaggcagccagttgcttcctgctttgggttcccagggcgccctctgcaatgctggacaataagacttccttctctcagctgagatgggtcattcattgactcctcaaacattttaaaaacccttggtgtgtgccaggacccgtgttgggctcagaacaaggtagaatgggaacaagatagaatgaggacagcccctgtggagctcacagtgtaatcattgttcctgtgtctgctctccctctgtcattctgctggttttctcttatcccctgtgcccagggaccacacaccatgggcctctatatatcttctgaatgaatgaccagaaaaagcagatcgagagtttgggggaggaaggaagtagcctgggatttgaccatctctgggctttgcacagaggggcctctctgatattaatgagctgggacccagctcagggcagtggagtacttgggcctccagcatcagaaaaacctgcaggaacatgcagattcctgagcctccttattccctacagaatcaagactgtctggggcagacctgagaatctgcattttaagaagatgattctcaggcatcccgaagattgagatctgttgcctcaaggactccagccttcttggacatttattgtgaaattaccagaacagcatttggtcttacacatactgatctctgttctgtcttcttttggtcattaagctctctgggagcagaggtgctatctacttgtccttttgctctccccgaccctacccccaagagctcagcgacttttattgcagatgtctttagaggctcttggacacacagtgtcttcctgtttctcatcctccttgcaggttggactcttcacagaaattgggcccatgtcttgcttcatctctcgacattccatcccttcagagatggagtttgatcctaactccaacccaccatgttacaagacaatggatgaggatattgtgattcagcaggacgatgagatccgcttaaagattgtggggacccgtgtggacaagaatgacatttttgctattggctccctgatggacgattacttggggcttgtaagctgagcctggtggcctcctacccttggtcctactctaggaagtgtgattgtcacacttatcatgttgtccagaggtccagtctggctgctgttgtggaggcaaggaaggcaactcatcccagaaggcatctggtgcttcttgtagcttaactactgcctcctcatttttcagtatgtgttctaagtataaaaagtccttggttctcaaaaaaaaaaaaaaaaaaaaaaaaaaaaaaaaaaaaaaaaaaaaaaaaaaaaaaaaaaaaaaaaaaaaaaaaaaaaaaaa

SEQ ID NO: 914 - protein, 504 aa, Homo sapien; identical to SEQ ID NO: 898

SEQ ID NO: 915 - DNA, 2115 bp, Homo sapien
ctcgcccgtccggcgcacgctccgcctccgtcagttggctccgctgtcgggtgcgcggcgtggagcggcagccggtctggacgcgcggccggggctgggggctgggagcgcggcgcgcaagatctccccgcgcgagagcggcccctgccaccgggcgaggcctgcgccgcgatggcagagatgggcagtaaaggggtgacggcgggaaagatcgccagcaacgtgcagaagaagctcacccgcgcgcaggagaaggttctccagaagctggggaaggcagatgagaccaaggatgagcagtttgagcagtgcgtccagaatttcaacaagcagctgacggagggcacccggctgcagaaggatctccggacctacctggcctccgtcaaagccatgcacgaggcttccaagaagctgaatgagtgtctgcaggaggtgtatgagcccgattggcccggcagggatgaggcaaacaagatcgcagagaacaacgacctgctgtggatggattaccaccagaagctggtggaccaggcgctgctgaccatggacacgtacctgggccagttccccgacatcaagtcacgcattgccaagcgggggcgcaagctggtggactacgacagtgcccggcaccactacgagtcccttcaaactgccaaaaagaaggatgaagccaaaattgccaaggccgaggaggagctcatcaaagcccagaaggtgtttgaggagatgaatgtggatctgcaggaggagctgccgtccctgtggaacagccgcgtaggtttctacgtcaacacgttccagagcatcgcgggcctggaggaaaacttccacaaggagatgagcaagctcaaccagaacctcaatgatgtgctggtcggcctggagaagcaacacgggagcaacaccttcacggtcaaggcccagcccagtgacaacgcgcctgcaaaagggaacaagagcccttcgcctccagatggctcccctgccgccacccccgagatcagagtcaaccacgagccagagccggccggcggggccacgcccggggccaccctccccaagtccccatctcagctccggaaaggcccaccagtccctccgcctcccaaacacaccccgtccaaggaagtcaagcaggagcagatcctcagcctgtttgaggacacgtttgtccctgagatcagcgtgaccaccccctcccagccagcagaggcctcggaggtggcgggtgggacccaacctgcggctggagcccaggagccaggggagacggcggcaagtgaagcagcctccagctctcttcctgctgtcgtggtggagaccttcccagcaactgtgaatggcaccgtggagggcggcagtggggccgggcgcttggacctgcccccaggtttcatgttcaaggtacaggcccagcacgactacacggccactgacacagacgagctgcagctcaaggctggtgatgtggtgctggtgatccccttccagaaccctgaagagcaggatgaaggctggctcatgggcgtgaaggagagcgactggaaccagcacaaggagctggagaagtgccgtggcgtcttccccgagaacttcactgagagggtcccatgacggcggggcccaggcagcctccgggcgtgtgaagaacacctcctcccgaaaaatgtgtggttcttttttttgttttgttttcgtttttcatcttttgaagagcaaagggaaatcaagaggagacccccaggcagaggggcgttctcccaaagattaggtcgttttccaaagagccgcgtcccggcaagtccggcggaattcaccagtgttcctgaagctgctgtgtcctctagttgagtttctggcgcccctgcctgtgcccgcatgtgtgcctggccgcagggcggggctgggggctgccgagccaccatgcttgcctgaagcttcggccgcgccacccgggcaagggtcctcttttcctggcagctgctgtgggtggggcccagacaccagcctagcctggctctgccccgcagacggtctgtgtgctgtttgaaaataaatcttagtgttcaaaacaaaatgaaacaaaaaaaaaatgataaaaactttcag

SEQ ID NO: 916 - protein, 482 aa, Homo sapien
MAEMGSKGVTAGKIASNVQKKLTRAQEKVLQKLGKADETKDEQFEQCVQNFNKQLTEGTRLQKDLRTYLASVKAMHEASKKLNECLQEVYEPDWPGRDEANKIAENNDLLWMDYHQKLVDQALLTMDTYLGQFPDIKSRIAKRGRKLVDYDSARHHYESLQTAKKKDEAKIAKAEEELIKAQKVFEEMNVDLQEELPSLWNSRVGFYVNTFQSIAGLEENFHKEMSKLNQNLNDVLVGLEKQHGSNTFTVKAQPSDNAPAKGNKSPSPPDGSPAATPEIRVNHEPEPAGGATPGATLPKSPSQLRKGPPVPPPPKHTPSKEVKQEQILSLFEDTFVPEISVTTPSQPAEASEVAGGTQPAAGAQEPGETAASEAASSSLPAVVVETFPATVNGTVEGGSGAGRLDLPPGFMFKVQAQHDYTATDTDELQLKAGDVVLVIPFQNPEEQDEGWLMGVKESDWNQHKELEKCRGVFPENFTERVP

SEQ ID NO: 917 - DNA, 738 bp, Homo sapien
aaagcagaattgagagtttgttcttacacacaagtttaatgccaccttcctctgtctgccatggaccaacaagcaatatatgctgagttaaacttacccacagactcaggcccagaaagttcttcaccttcatctcttcctcgggatgtctgtcagggttcaccttggcatcaatttgccctgaaacttagctgtgctgggattattctccttgtcttggttgttactgggttgagtgtttcagtgacatccttaatacagaaatcatcaatagaaaaatgcagtgtggacattcaacagagcaggaataaaacaacagagagaccgggtctcttaaactgcccaatatattggcagcaactccgagagaaatgcttgttattttctcacactgtcaacccttggaataacagtctagctgattgttccaccaaagaatccagcctgctgcttattcgagataaggatgaattgatacacacacagaacctgatacgtgacaaagcaattctgttttggattggattaaatttttcattatcagaaaagaactggaagtggataaacggctcttttttaaattctaatgacttagaaattagaggtgatgctaaagaaaacagctgtatttccatctcacagacatctgtgtattctgagtactgtagtacagaaatcagatggatctgccaaaaagaactaacacctgtgagaaataaagtgtatcctgactcttga

SEQ ID NO: 918 - protein, 225 aa, Homo sapien
MDQQAIYAELNLPTDSGPESSSPSSLPRDVCQGSPWHQFALKLSCAGIILLVLVVTGLSVSVTSLIQKSSIEKCSVDIQQSRNKTTERPGLLNCPIYWQQLREKCLLFSHTVNPWNNSLADCSTKESSLLLIRDKDELIHTQNLIRDKAILFWIGLNFSLSEKNWKWINGSFLNSNDLEIRGDAKENSCISISQTSVYSEYCSTEIRWICQKELTPVRNKVYPDS

SEQ ID NO: 919 - DNA, 1431 bp, Homo sapien; identical to SEQ ID NO: 542

SEQ ID NO: 920 - protein, 120 aa, Homo sapien
MAVTGDETDEETDLAPSHMAAATGDMPTYQIRAPTTALPQGVVMAASPGSLHSPQQLAEEATRKRELRLMKNREAAKECRRRKKEYVKCLESRVAVLEVQNKKLIEELETLKDICSPKTD

SEQ ID NO: 921 - DNA, 345 bp, Homo sapien
atgagacttctcatcctggccctccttggcatctgctctctcactgcatacattgtggaaggtgtagggagtgaagtctcacataggaggacctgtgtgagcctcactacccagcgactgccagttagcagaatcaagacctacaccatcacggaaggctccttgagagcagtaatttttattaccaaacgtggcctaaaagtctgtgctgatccacaagccacgtgggtgagagacgtggtcaggagcatggacaggaaatccaacaccagaaataacatgatccagaccaagccaacaggaacccagcaatcgaccaatacagctgtgaccctgactggctag

SEQ ID NO: 922 - protein, 114 aa, Homo sapien
MRLLILALLGICSLTAYIVEGVGSEVSHRRTCVSLTTQRLPVSRIKTYTITEGSLRAVIFITKRGLKVCADPQATWVRDVVRSMDRKSNTRNNMIQTKPTGTQQSTNTAVTLTG

SEQ ID NO: 923 - DNA, 3500 bp, Homo sapien
cacgtggctgcagcggggccagagcagcaatggcggcgggcggcggcggtagctgcgaccccctggcccctgctggggtcccttgcgccttctccccgcacagccaggcctacttcgctttggcctctaccgacggtcacttacgagtatgggagacggccaacaaccggctgcaccaggagtacgtgccttccgcgcacctcagtggtacctgcacctgtctggcctgggcgccagcgcggctgcaggccaaggaaagtccccagaggaaaaaaaggaaatcagaagctgtaggaatgagtaaccagactgacttattggctcttggcacagcagttggtagcattttattatacagcacagtaaaaggagagttacacagtaaattaataagtggtggacatgacaacagagtcaactgcatacagtggcatcaagacagtggctgtttatatagttgttcagatgataaacatattgtggaatggaacgtacagacatgcaaagtaaagtgcaaatggaaaggggacaatagcagtgtcagttccctatgtatcagcccagatggaaagatgttgctttcagctggtcgaacaatcaaactatgggttttggagaccaaagaagtctacaggcatttcacaggacatgcaacgccagtttcgtcactgatgttcactaccatcagacctcctaatgagagccagccctttgatggaattacaggtctttatttcttatctggagcagtacatgaccggttacttaatgtctggcaggtccgatcagaaaacaaagaaaagagtgcagtgatgtcatttacagttaccgatgaacctgtctatattgacttaactttgtcagaaaacaaagaagagcctgtcaagttggctgttgtttgcagagatggtcaagtccatctttttgaacacatattaaatgggtactgcaaaaagcctttgacttcaaactgcacaattcagatagcaacacctgggaaaggcaagaagtcaacaccaaaacccatccctattctagctgctggtttttgctcagacaaaatgtcattgttgcttgtatatggcagttggtttcagcctactattgagcgagtggctttaaactccagagaacctcatatgtgtttagtaagagatatttcaaactgctgggcccccaaagtagaaacagctataacaaaggtgaggacaccagtgatgaattctgaagcaaaagttctggtgcctgggattcctggtcatcatgcagctatcaagcccgctcctccacaaaccgagcaagtagagagcaagaggaagtcagggggaaatgaggttagcattgaagaacgtctgggagcaatggatatagacacacacaaaaaaggaaaggaagacctccagacgaatagctttccagttcttcttacccagggcttagaaagtaacgattttgaaatgctaaataaagtacttcaaactaggaatgtaaaccttataaagaagactgtattaaggatgcccctgcatactattattccgttgttacaagagcttacaaagaggttacaaggacatcctaatagtgctgtgctaatggttcagtggctaaaatgtgtgttaacagttcatgcatcatacctgtccacgttgcctgacctggtaccccagctggggacactctaccagttaatggaaagcagagtcaaaacttttcagaaactttcacaccttcatggaaagcttattcttctaattacacaagtaacagcatcagagaagacaaagggagcaacttcccctggacagaaggcaaagttggtgtatgaagaagagtcttctgaagaggagtctgatgatgaaatagcagataaggattctgaagataattgggatgaagatgaggaggagagtgaaagtgaaaaagatgaggacgttgaagaggaagatgaggatgccgaaggaaaagatgaagaaaatggcgaggacagagatacagcaagtgaaaaagaattaaatggagattctgacttagatcctgaaaatgaaagtgaagaagaatgaagacagcaaagcaagccggtcaaactatataaactctggctcaccttgcccagtggtgagggctgcctctgtgccaggatgccaaggaccgctgcacatttccaaattcacagcagtggatcccatgccactttgctgtcctgagcaccccagacttgactgtgtaaataagagtgtttcattcaaatgttaataaactttacacagtatatagacacattttctgcaatgtactgacatcagtgtccaatatatggtatatttttataatataatatcctagtatgattggttatatcaagaattgacaagtgcagataaagacctttcccataggagttcaagaactggactgttgtgaagaagtcagctcttatctcaggttggtatctttcatcaaatccagatgcaaagcagcactagtgaaaatttttttaatttagtacatttaatttggtacattttcataaaatatgaagggataactacaaactggagtaaaaatgatggtaattaaaaaaaatcctcagtatccctagcttgtctattaactgtgataatctgacttgagtcagattgaatatttggagtgcttccccagaataaccacttatttttgaagctatcatgtgaagtatttttttaaaacaaaacaaaaattatggtcattaaaaaactagagaattagccatattaaggatttttcttgactgcaaattacttctaaagaatcatcagtgtatagattagaagtgctcattacctgcaacttttaaaaaaaattcagttatagctgcttttgaagaggtttccatttttatttaaattactaatggatcaaagaacaattgtttattttttctctttggttttagatattaatgataaccttgttggaattttttttccaaagaaaatatttttataattaaataatttaatgtttttcttccttttcattacctactcttggcagtgttagggtatctgtttacctttaaaatgataagtctcactcaagattttttatctatgtataaatattttggtgtgctacaaaagcctttacaaattatcagtagtagtttttttttttttttttttttttaaagaatgagccgatattggcttagtgctcactaggggacatgcacatggaagctcacctctaagaaagggctgggcagatggatttattttttcccacctgtgaatatgtaaaacaaaaccattatctttgagggagtttttaataccaatgacagaacagagatttgtgtgctcatcttaagagccagagccatataagcatcttgggaaagcaagtttgaaccagctgctggtgtaatgtacagttatatttgtctataaatggagctgtttatggcaatttaataccattctctttgtaaagtgaataaatattcatcttttccc

SEQ ID NO: 924 - protein, 686 aa, Homo sapien
RGCSGARAAMAAGGGGSCDPLAPAGVPCAFSPHSQAYFALASTDGHLRVWETANNRLHQEYVPSAHLSGTCTCLAWAPARLQAKESPQRKKRKSEAVGMSNQTDLLALGTAVGSILLYSTVKGELHSKLISGGHDNRVNCIQWHQDSGCLYSCSDDKHIVEWNVQTCKVKCKWKGDNSSVSSLCISPDGKMLLSAGRTIKLWVLETKEVYRHFTGHATPVSSLMFTTIRPPNESQPFDGITGLYFLSGAVHDRLLNVWQVRSENKEKSAVMSFTVTDEPVYIDLTLSENKEEPVKLAVVCRDGQVHLFEHILNGYCKKPLTSNCTIQIATPGKGKKSTPKPIPILAAGFCSDKMSLLLVYGSWFQPTIERVALNSREPHMCLVRDISNCWAPKVETAITKVRTPVMNSEAKVLVPGIPGHHAAIKPAPPQTEQVESKRKSGGNEVSIEERLGAMDIDTHKKGKEDLQTNSFPVLLTQGLESNDFEMLNKVLQTRNVNLIKKTVLRMPLHTIIPLLQELTKRLQGHPNSAVLMVQWLKCVLTVHASYLSTLPDLVPQLGTLYQLMESRVKTFQKLSHLHGKLILLITQVTASEKTKGATSPGQKAKLVYEEESSEEESDDEIADKDSEDNWDEDEEESESEKDEDVEEEDEDAEGKDEENGEDRDTASEKELNGDSDLDPENESEEE

SEQ ID NO: 925 - DNA, 262 bp, Homo sapien
gccacttgcagtgatgttttgttcttccctagctcctgcagatacctaaagatagtccataatctttttgggtctcacttctgcaaattggagttcatacttgcgctatcttttgttgaagaaccctcaagatagttgcaaaaagtattttgaaaagtataaagtgatgggtttaatgtaaatgttttattcaatactactatcctctagactaatttggttgtagttcacattacagtagctgcttcgtaagtgatttttg

SEQ ID NO: 926 - protein, 44 aa, Homo sapien
ATCSDVLFFPSSCRYLKIVHNLFGSHFCKLEFILALSFVEEPSR

SEQ ID NO: 927 - DNA, 926 bp, Homo sapien
gaatctctttctctcccttcagaatcttatcttggctttggatcttagaagagaatcactaaccagagacgagactcagtgagtgagcaggtgttttggacaatggactggttgagcccatccctattataaaaatgtctcagagcaaccgggagctggtggttgactttctctcctacaagctttcccagaaaggatacagctggagtcagtttagtgatgtggaagagaacaggactgaggccccagaagggactgaatcggagatggagacccccagtgccatcaatggcaacccatcctggcacctggcagacagccccgcggtgaatggagccactgcgcacagcagcagtttggatgcccgggaggtgatccccatggcagcagtaaagcaagcgctgagggaggcaggcgacgagtttgaactgcggtaccggcgggcattcagtgacctgacatcccagctccacatcaccccagggacagcatatcagagctttgaacaggtagtgaatgaactcttccgggatggggtaaactggggtcgcattgtggcctttttctccttcggcggggcactgtgcgtggaaagcgtagacaaggagatgcaggtattggtgagtcggatcgcagcttggatggccacttacctgaatgaccacctagagccttggatccaggagaacggcggctgggatacttttgtggaactctatgggaacaatgcagcagccgagagccgaaagggccaggaacgcttcaaccgctggttcctgacgggcatgactgtggccggcgtggttctgctgggctcactcttcagtcggaaatgaccagacactgaccatccactctaccctcccacccccttctctgctccaccacatcctccgtccagccgccattgccaccaggagaacccg

SEQ ID NO: 928 - protein, 233 aa, Homo sapien [sequence omitted]

SEQ ID NO: 929 - DNA, 1725 bp, Homo sapien
cgcctcttcacggcactgggatccgcatctgcctgggatcatcaagccctagaagctgggtttctttaaattagggctgccgttttctgtttctccctgggctgcggaaagccagaagattttatctagcttatacaaggctgctggtgttccctctttttttccacgagggtgtttttggctgcaattgcatgaaatcccaatggtgtagaccagtggcgatggatctaggagtttaccaactgagacatttttcaatttctttcttgtcatccttgctggggactgaaaacgcttctgtgagacttgataatagctcctctggtgcaagtgtggtagctattgacaacaaaatcgagcaagctatggatctagtgaaaagccatttgatgtatgcggtcagagaagaagtggaggtcctcaaagagcaaatcaaagaactaatagagaaaaattcccagctggagcaggagaacaatctgctgaagacactggccagtcctgagcagcttgcccagtttcaggcccagctgcagactggctccccccctgccaccacccagccacagggcaccacacagccccccgcccagccagcatcgcagggctcaggaccaaccgcatagctgcctatgcccccgcagaactggctgctgcgtgtgaactgaacagacggagaagatgtgctagggagaatctgcctccacagtcacccatttcattgctcgctgcgaaagagacgtgagactgacatatgccattatctcttttccagtattaaacactcatatgcttatggcttggagaaatttcttagttgggtgaattaaaggttaatccgagaattagcatggatataccgggacctcatgcagcttggcagatatctgagaaatggtttaattcatgctcaggagctgtgtgcctttccatcccttccggctccctacccctcacttccaagggttctctctcctgcttgcgcttagtgtcctacatggggttgtgaagcgatggagctcctcactggactcgcctctctcctctcctccccccaggaggaacttgaaaggagggtaaaaagactaaaatgagggggaacagagttcactgtacaaatttgacaactgtcaccaaaattcataaaaaacaatagtactgtgcctctttcttctcaaacaatggatgacacaaaactatgagagtgacaaaatggtgacaggtagctgggacctaggctatcttaccatgaaggttgttttgcttattgtatatttgtgtatgtagtgtaactattttgtacaatagaggactgtaactactatttaggttgtacagattgaaatttagttgtttcattggctgtctgaggaggtgtggacttttatatatagatctacataaaaactgctacatgacaaaaaccacacctaaaccccttttaagaatttggcacagttactcactttgtgtaatctgaaatctagctgctgaatacgctgaagtaaatccttgttcactgaagtctttcaattgagctggttgaatactttgaaaaatgctcagttctaactaatgaaatggatttcccagtaggggtttctgcatatcacctgtatagtagttatatgcatatgtttctgtgcatgttctctacacaattgtaaggtgtcactgtatttaactgttgcacttgtcaactttcaataaagcatataaatgttg

SEQ ID NO: 930 - protein, 144 aa, Homo sapien
MKSQWCRPVAMDLGVYQLRHFSISFLSSLLGTENASVRLDNSSSGASVVAIDNKIEQAMDLVKSHLMYAVREEVEVLKEQIKELIEKNSQLEQENNLLKTLASPEQLAQFQAQLQTGSPPATTQPQGTTQPPAQPASQGSGPTA

SEQ ID NO: 931 - DNA, 3256 bp, Homo sapien
  Unsure 1734-1894: Unknown base
cagaggcagggaaaaccacgcagaagcaggagctgaagacctcagaccggcaccaggacagcttaatgaagacaaactgaaggggaaactgagatccttagaaaaccagctatacacctgtacccagaaatactccccttggggaatgaaaaaagtactactggagatggaagaccagaaaaacagctatgagcagaaggccaaggagtcactgcagaaagtgctggaggagaaaatgaatgcagagcagcaactacagagcacacaggtatggggatgccacatagacatggggctggggactccaggcagcttggggaacaaggggagccagctgcacaactccctggagccctctcctctctgatctccctcagcgatccctggccctggcagagcagaagtgtgaagagtggaggagccagtatgaggctctgaaggaggactggaggacccttgggacccagcacagggagctggagagccaactccacgtgcttcagtccaaactgcaggtaccaggcactgggggtggggagggaagacagggtatggggaggagggatggtgatgaaagaagctgttctggattagggactccaaaggcagctgacagcatctggctttcagttcctcagtcaccactactttgtaccaaattcactgttttggctctgaaatctaattttgagtttagcaaggatgtctgcattgctcatgcaaatgaactaagcgttcattggaatgacaccatcaccacccaaatgaaaagaactggctggaatattcatcagcctactaatgtcatctcccaacccactctccaaactccatcccaaaaaagcatccagttcagaattgcccactgttggcaaagaaagaatgtcactaatttatttacaggtgagtattaacactttctgccaatgtgtattttaagcaattacatttagcaattacaattagattcttggcatcctcaagggttccatcatcttcaatctgtcctaagcctcagtttcccccatctctagaatgaggataatagtacctacatcataaggtggctctgagtattaagtaagatgatccatgtcaagcacttagcacaatgcctggcacacaaaaacactcagtaaatattagctattattttgcatagatttatttacctggtttggaattttgaggatccacctcaaaagctgatctttgtaattttcctgaagcagggctcagaacagcccacttgataagagacagagtatgtgagtcttatcaaaggagtgaacccagctggtcactctgcgtggtatccacagctcaacctttgttgttttcttcttcccatcacctataaggcaactcctatgaagatttttgtgaggggttttttaactttaaatctttgtggaaaaaaaaagaccctaaccaaaaaaaaactgatactgccagaagtagaaaaaagagaaaatgaaaacatccagaaaactaatgactttgtattccttaatttggtgatttaccaaagtgtcaagacatgactcccacaccaatgacaaccacttacatttcccctagaatggcagattttttaacgtactgggtttcctaaagcaattcttattttatatattctaatttatgtacatgaatgtgtcacttagacctgtcactagggatggtttagaaaataaacttacactgcacatgcctcagtccacttcaaaactnnnnnnnnnnnnnnnnnnnnnnnnnnnnnnnnnnnnnnnnnnnnnnnnnnnnnnnnnnnnnnnnnnnnnnnnnnnnnnnnnnnnnnnnnnnnnnnnnnnnnnnnnnnnnnnnnnnnnnnnnnnnnnnnnnnnnnnnnnnnnnnnnnnnnnnnnnnnnnnnnagacgcgagttccttgtgaatatcaaaagtctaatctgctgttataaatatgaggaacaaagcaaagggaagaaataggaaaaaagaaagacttctctattttctcatctccctaacattccttctatctctaaaattccagacttttctacattttcctcttccatggtacccgccccccaacctccaccccaacactgaccatccttctatattggcccctcctcctccttacagggagcagatagcagggacttacagatgaaccaggccctgcgatttttggaaaatgagcaccaggaactgcaggccaagattgaatgcctgcaaggggacagagacctgtgcagcttggatacccaggacctacaaggtactcttctccttggaggccttgagtgcatggcagccatggccaagtgagctaagaaaaaagaaactgaattaagagaaaggcttcagccttttatttgtttgcttgattggttgattggctttataatctcattttaccttgagggagaggcaggactgttttaatcatccaaaattgaaaattaatttcactgtagtagatagagtatcttgttgtctgagctctcttttttagcccatccctctgggccagatcacagctgctcccacatcagtcacatatgtcaaggccacagtcctaatttgaaagggaaaggtcagttgaaacacaaggcatagagaaagtctctcagtcacatcctctgtgtccgctgatagagaggactagatagtgtgtaaacacaagcctcaatgcaacccaacattgttgatgcacaaaaacctgaggtacttggcttctggtttacctcttcagaactgggacacgaagatagagcaacttccaatagacacacgttaaagaccatgacaagacagcatctattactaatttccatcctaagtactgagttcattaagtcttgggttcctttattttggcttgcattattgcattttcagatcaactaaaaaggtcagaggcagagaaactcaccctggtgaccagagtacagcagttgcagggtttgcttcaaaatcaatccttacagcttcaagaacaggagaaactcttaacaaagaaaggtcagcaaatttattaccacaaattctaagatattgctcttctcttacctgcctagaggcagcgggatggactacatgacctcctggagtcccagccagttctgggagtctgttaagtccgggatgtgtgggagctttttaaggactgatcattggctctgaggacacttcaactagttagccttctatcttgaggtatataaactgtgaaaagggttctattctctctgaaagcacatgtct

SEQ ID NO: 932 - protein, 121 aa, Homo sapien
RGRENHAEAGAEDLRPAPGQLNEDKLKGKLRSLENQLYTCTQKYSPWGMKKVLLEMEDQKNSYEQKAKESLQKVLEEKMNAEQQLQSTQVWGCHIDMGLGTPGSLGNKGSQLHNSLEPSPL

SEQ ID NO: 933 - DNA, 1453 bp, Homo sapien
gttggaaataactataacttaaagcaaatctaacccagtaagctatcaaaaagaaaaattatataattaccaagtagagttaatttcacctgagttctatgaacatattcattattaaaggaaacctcaaattattgtcccattggaagcaaaatatacatttataaatagccatttctcgttttaaaaaactaataacattgaaataaacagaaacttaagctcttctagtttgccaaaaaccagaaagcaaacatcatatactaaatgatgaaatgccaaagccatttccattatatcagaaacgagactaatacttcctgtcatcatttacatgattgtcactattattaagcattgttttggtagttctagccattgcagtaagacagtagacagaaagtcaaataattggcataaatattggaaacaaaaaattatttctactttgaaatgatacaatagaatagctggaaagcccagggggactctagtagaaaacagcaatgaggattaaatgtaagacactttggaaagctgatgtgtgagaaatgtacacaaactaatagctttctctttattagtagtcatcagttgaaaatggaaatgaccaagcaaaaatattcaacagaatgacaaaactattggttacacctaggaataaatgtgttaaagaaaggtacagagtgaaggtaatgacccttatgaagaaaacttgatattataaaaagtagtccttttctccctcagtttttgtcttcaaaatgtttacttgggacagatcgtggtttacatgatggtcctcaaacatattgtgaacaacattaaaaaaaaaagacacattttactcaataagtaacattttttgagaagctactatgtgctagggacctagtttttagtgcagtggtctccaaaataatgtactggcagtatgggaagagcgtttagaacactgtacctttttatttgggaggagaaaagaaacctttgtcaaatatttaacacctgctgccagaggtctgtagatttgatgattgtgtgccatgagttacacacagactcctaaatcagtttcacctgtggtgtcctcattctgtttactttgagcattttgcattctatatctgcttagttatatggatttattcgtcccatataatatgtgtagccacatggacacatgttttaaaaggttttaaattctgcaagatagtgacgatgatgtaaacacaagaaaagggcaaatggatacattttcctactctgtgctcatcaaacatattacaggataaaattattggctatctaataaaaacacagactaataagacctgataagttggacaaaatgtttaaaaattaacatgaagatgataggaagtatgaatctatattcactgtcattaatgtcaaacctttaccttatggtatattgtactttgagaaatta

SEQ ID NO: 934 - protein, 14 aa, Homo sapien
MSNLYLMVYCTLRN

SEQ ID NO: 935 - DNA, 4232 bp, Homo sapien
aaaattgcgtttgagtttgccgcgagccgggccaatcggttttgccaacgcatgcccacgtgctggcgaacaaatgtaaacacggagatcgtgtgccgggcacttggtttcgtggtgggcaactgtgctgctgtttcttttggccgcggacaaggtcggcagaggtggacccctgcttgggagagctcttctcgctgtgctgacacccgcccctaacagtcacccaccccggggaaataatggggctcggaggcctcctcccagccagtgtccagcctaagcacatcggctcccgcagttcagaaaggtcccgaggcccgagtcaccatttccggctcagacctcgacccggaacgtggctgcccactgccacgcccactacgccccagtggctcgccccaggggacgaggggcaagaagcggcctccgagggcagcggccgaaggccattcggtccctggctcttcccagctcgcagagacccggaagcgctgcccggccgcctgcccctcttcagatcccccagcaccggaggagcagcgagggggctgcgtccaggccggctttcgggtcggcttaggcgaatccagctctcttttgcccctcccagaaggcccagccccgtccgggcggtgttcgggcggcgccgggccgggccccccgccgccccaggctcgctcataggcccggaacaccacagcccgcccagacttggctggcgccgagccgggggtggagccagcgggttcccgccaaaatcgcgtagctggtccttcccccgcgggctacgtcgcgccctcctttttttttcaaacccggagctgcactgggattggtggactgggcactcacgtggttaacggtcgcgggaagccgcggagcccgaacctgagactggacctgaggagacctcagcctcggtgctcgggccgccccgcctctgccggaaagtccgcgccgccgctgccgccaccgtccgcagcccgagcgccccggagccgcaggccgccgccgcgcagagacgccgcggctgcgactaggcgcgcccagccgcacgtggcggacccgcccccaggcccgcagtgtcctggaccccgcaggcctccgctctcctgtcctcggccccgtccccagggccgcgatgagcttcctgagccgacagcagccgccgccaccccgccgcgccggggcggcctgcaccttgcggcagaagctgatcttctcgccctgcagcgactgtgaggaggaggaagaagaggaggaggaggagggcagcggccacagcaccggggaggactcggcctttcaagagcccgactcgccgctgccgcccgcgcggagccccacggagcccgggcccgagcgccgccgctcgcccgggccggcccccgggagccccggcgagctggaggaggacctgttgctgcccggcgcctgcccgggcgcggacgaggcgggcggtggggcggagggcgactcgtgggaggaggagggcttcggctcctcgtcgccggtcaagtcgccggcggccccctacttcctgggtagctctttctcgccggtgcgctgcggcggcccaggagatgcgtcgccgcggggttgcggggcgcgccgggcgggcgaaggccgccgctcgccgcggccggaccacccgggcaccccgccacacaagaccttccgcaagctgcgactcttcgacaccccgcacacgcccaagagtttgctctccaaagctcggggaattgattccagctctgttaaactccggggtagttctctcttcatggatacagaaaaatcaggaaaaagggaatttgatgtgcgacagactcctcaagtgaatattaatccttttactccggattctttgttgcttcattcctcaggacagtgtcgtcgtagaaagagaacgtattggaatgattcctgtggtgaagacatggaagccagtgattatgagcttgaagatgaaacaagacctgctaagagaattacaattactgaaagcaatatgaagtcccggtatacaacagaatttcatgagctagagaaaatcggctctggagaatttggttctgtatttaagtgtgtgaagaggctggatggatgcatttatgccattaagcgatcaaaaaagccattggcgggctctgttgatgagcagaacgctttgagagaagtatatgctcatgcagtgcttggacagcattctcatgtagttcgatatttctctgcgtgggcagaagatgatcatatgcttatacagaatgaatattgtaatggtggaagtttagctgatgctataagtgaaaactacagaatcatgagttactttaaagaagcagagttgaaggatctccttttgcaagttggccgaggcttgaggtatattcattcaatgtctttggttcacatggatataaaacctagtaatattttcatatctcgaacctcaatcccaaatgctgcctctgaagaaggagacgaagatgattgggcatccaacaaagttatgtttaaaataggtgatcttgggcatgtaacaaggatctccagtccacaagttgaagagggcgatagtcgttttcttgcaaatgaagttttacaggagaattatacccatctaccaaaagcagatatttttgcgcttgccctcacagtggtatgtgctgctggtgctgaacctcttccgagaaatggagatcaatggcatgaaatcagacagggtagattacctcggataccacaagtgctttcccaagaatttacagagttgctaaaagttatgattcatccagatccagagagaagaccttcagcaatggcactggtaaagcattcagtattgctgtccgcttctagaaagagtgcagaacaattacgaatagaattgaatgccgaaaagttcaaaaattcacttttacaaaaagaactcaagaaagcacagatggcaaaagctgcagctgaggaaagagcactcttcactgaccggatggccactaggtccaccacccagagtaatagaacatctcgacttattggaaagaaaatgaaccgctctgtcagccttactatatactgagctactcctttcccacctccccctgaacactgtgacaagaggaagctaggttgaaatcactgatagaatccagtttgcaattactttctcgattggtgtcagtagttttactgattaggacttttattgtgaattacagttgaaagctgtattttgatgattgctatgtcaggctttcatctaatcttaccagtctgtcttctgtaggatgtgtcactgttggatgttacaccagcctttccagggttaaccactgtggtggtgtgctgcttatagtttgctgttgcattgtaataaaaggtgtctttccctgtagtgacctgtaaaaagtactcaagggctttattacagacataccctccctttgaaaagggacatgctaaaagactcattactactcagccttcaatgtacctgtgtgtccatcttatatttcttttttttttttaattgtgaattagacttgtatatcccactgggagcactttgtaggcattgcatgaaccatgggatgatgattctgtggaggtattgccttgtgaatttgctgctattttagttttgtctttgctgtaaacttgtagcattaaacaatcattgttgttaataggtcttctttttgaaacaattatgtgaaatgtatagctgcttttgatgaaaagcagctatttgccttttttttttttcctttgaactttgaagctagtgcattggaaaaatgcaccctttccctcctttggaatgctgtattaatgtagtataataattactggttttgtaacttgttctggtaatgtccttcccggactctttttaaatgtctccccctaagttttatacttgattgtattattagtctgtttttaaatgttttgcccggtttttctcttcaatatttgtgtatataaaccgatcttcgtgatactgtacatagctgtttgaaatgccagaatgacttctgacattccaagtttttcacaaaatatattttatctgtgattagccatttgactaataatactggctaacagatgttgaaaaaaattgtctgtttgttttctcattaattttggtctaaaacatgtttgcacttgtctttgacttgtgttttattaacattgattggcatattaaaagtcactctgagctt

SEQ ID NO: 936 - protein, 646 aa, Homo sapien
MSFLSRQQPPPPRRAGAACTLRQKLIFSPCSDCEEEEEEEEEEGSGHSTGEDSAFQEPDSPLPPARSPTEPGPERRRSPGPAPGSPGELEEDLLLPGACPGADEAGGGAEGDSWEEEGFGSSSPVKSPAAPYFLGSSFSPVRCGGPGDASPRGCGARRAGEGRRSPRPDHPGTPPHKTFRKLRLFDTPHTPKSLLSKARGIDSSSVKLRGSSLFMDTEKSGKREFDVRQTPQVNINPFTPDSLLLHSSGQCRRRKRTYWNDSCGEDMEASDYELEDETRPAKRITITESNMKSRYTTEFHELEKIGSGEFGSVFKCVKRLDGCIYAIKRSKKPLAGSVDEQNALREVYAHAVLGQHSHVVRYFSAWAEDDHMLIQNEYCNGGSLADAISENYRIMSYFKEAELKDLLLQVGRGLRYIHSMSLVHMDIKPSNIFISRTSIPNAASEEGDEDDWASNKVMFKIGDLGHVTRISSPQVEEGDSRFLANEVLQENYTHLPKADIFALALTVVCAAGAEPLPRNGDQWHEIRQGRLPRIPQVLSQEFTELLKVMIHPDPERRPSAMALVKHSVLLSASRKSAEQLRIELNAEKFKNSLLQKELKKAQMAKAAAEERALFTDRMATRSTTQSNRTSRLIGKKMNRSVSLTIY

SEQ ID NO: 937 - DNA, 4050 bp, Homo sapien
gaattcggcacgaggtcacccggataggtaaaggaaaacatgcctgccacacggaagccaatgagatatgggcatacagagggacacacggaggtctgttttgatgattctgggagttttattgtgacttgtggaagtgatggtgatgtgaggatttgggaagacttggatgatgatgatcctaagttcattaatgttggagaaaaggcatattcatgtgctttgaagagtggaaaactggtcactgcagtttctaataatactattcaagtccacacatttcctgaaggagttccagatggtatattgactcgcttcactacaaatgcaaaccatgtggtctttaatggggatggtactaaaattgctgctggatctagtgattttctagtcaaaattgtggatgtgatggatagcagccaacagaaaacatttcgaggacatgatgcccctgttttaagtctttcctttgatcctaaggacatctttctggcatcagctagttgtgatggatctgtcagagtgtggcaaatttcagatcagacatgtgctattagttggccactgctacaaaaatgcaacgatgtgataaatgcaaaatcaatctgcagacttgcttggcagccaaaaagtgggaagttactggcaattcctgtggaaaaatctgttaagctatatagaagagaatcttggagtcatcaatttgatctttcagataatttcatctctcagaccctcaatatagtaacctggtctccctgtgggcaatatttagctgcaggtagtattaatggtctaatcatagtttggaatgtggaaaccaaagactgcatggaaagggtgaaacatgagaaaggttatgcaatttgtggtctggcatggcatcctacttgtggtcgaatatcgtatactgatgcggaaggaaatctagggcttctagagaatgtttgtgaccccagtggaaagacatcaagcagtaaggtatctagcagagtggaaaaggattataatgatctttttgatggagatgatatgagtaatgctggtgattttctaaatgacaatgcagttgagatcccttctttttcaaaagggattataaatgatgatgaggatgatgaagacctcatgatggcttcaggtcgtcctagacagcgaagtcacatcctagaagatgatgaaaactcagttgatatttcaatgctaaaaactggttctagtcttctcaaagaggaggaggaagatggtcaagaaggcagcattcacaatctaccacttgtaacatcccaaaggccattttatgatggacccatgccaactccccggcaaaagccatttcagtcaggttctacaccgttgcatctcactcacagattcatggtgtggaactctattggaattattcgctgctataatgatgagcaagacaatgccatagatgtggagttccatgatacctccatacaccatgcaacacacttatcaaacactttgaattatacaatagcagatctttcccacgaagctattttgttggcatgtgaaagcactgatgaactagcaagcaagcttcactgcctgcactttagttcttgggattcaagcaaagagtggataatagacttgcctcagaatgaggatattgaagccatatgtctcggtcaaggatgggctgctgccgctactagtgccctgcttcttcgattgtttactattggaggggttcaaaaagaggtattcagccttgctggacctgtggtgtcaatggcaggacatggagaacagcttttcattgtttatcacagaggtacaggatttgatggggatcagtgccttggagttcaactgctagagctggggaaaaagaaaaaacaaattttgcatggtgaccctcttcctcttacaaggaaatcctaccttgcatggattgggttttcagctgaaggtaccccttgttacgtggattcagaaggaattgttcgaatgcttaacagaggacttggtaatacgtggactcctatatgtaatacaagagagcactgcaaaggaaaatctgatcactactgggtggttggtatccatgaaaatccccagcaactaaggtgcattccttgtaaaggttctcggtttcccccaacccttccacgccctgctgttgctatattatcctttaagcttccttactgtcagattgcaacagagaaaggacaaatggaggagcaattttggcgttcagttatatttcacaaccaccttgattatttagctaaaaatggttatgaatatgaagagagcactaaaaatcaagcaacaaaagagcaacaggaacttttaatgaaaatgcttgcgctttcttgtaaactggagcgagaattccgttgtgtggaacttgctgatctaatgactcaaaatgctgtgaatttagccattaaatatgcttctcgctctcggaaattaatactggctcaaaaactaagtgaactggctgtagagaaggcagccgaattgacagcaacccaggtggaagaggaagaagaagaagaagatttcagaaaaaagctgaatgctggttacagcaatactgctacagagtggagccaaccaaggttcagaaatcaagttgaagaagatgctgaggacagtggagaagctgatgatgaagaaaaaccagaaatacataagcctggacagaactcgttttccaaaagtacaaattcctctgatgtttcagctaagtcaggtgcagttacctttagcagccaaggacgagtaaatccctttaaggtatcagccagttccaaagaaccagccatgtcaatgaattcagcacgttcaactaatattttagacaatatgggcaaatcatccaagaaatccactgcacttagtcgaactacaaataatgaaaagtctcccattataaagcctctgattccaaagccgaagcctaagcaggcatctgcagcatcctatttccagaaaagaaattctcaaactaataaaactgaggaagtgaaagaagaaaatcttaaaaatgtattatctgaaaccccagctatatgtcctcctcaaaacactgaaaaccaaaggccaaagaccgggttccagatgtggttagaagaaaatagaagtaatattttgtctgacaatcctgacttttcagatgaagcagacataataaaagaaggaatgattcgatttagagtattgtcaactgaagaaagaaaggtgtgggctaacaaagccaaaggagaaacggcaagtgaaggaactgaagcaaagaagcgaaaacgtgtggttgatgaaagtgatgaaacagaaaaccaggaagaaaaagcaaaagagaacctgaatttgtctaaaaagcagaaacctttagatttttctacaaatcagaaactatcagcttttgcatttaagcaggagtaaaggaagaaagtgaccctagggaagtaatggattttttttactcatctttgaatatagactcgagtctttgggaaactcattatatatatattttttaaagagtttgaagcaactgtttgtctttataagataatgtagtaattatattggtgtaggtaacaggacatatgtaaaaactatcatctttgcagattactctgcctccaaatgcagggcctttcagagatgcattgtgattgtaattactgagttgaagctccaaccaatttgaatttgtttcttaaccttgaaaaatcattaaagccaaggtattaaaacctttgtgcattaataccttctaggggtttggttcatttggtttttgtcatgtgcaaggaaggacaatagtcctctttccaagtgtgttagcatagacttctctatatgtttctactagacctaggggatgacgtcttttaataatactggccctaaacatgtaaataatcttgtaggtgagactttttcttttgtgtttcggaaatttcctatgtggctttcagttgtctgtttgtatagcctggatttttttgaggtaaatgaaactttctcatttgtaaaaaaaaaaaaaaaaaactcgag

SEQ ID NO: 938 - protein, 1129 aa, Homo sapien
MPATRKPMRYGHTEGHTEVCFDDSGSFIVTCGSDGDVRIWEDLDDDDPKFINVGEKAYSCALKSGKLVTAVSNNTIQVHTFPEGVPDGILTRFTTNANHVVFNGDGTKIAAGSSDFLVKIVDVMDSSQQKTFRGHDAPVLSLSFDPKDIFLASASCDGSVRVWQISDQTCAISWPLLQKCNDVINAKSICRLAWQPKSGKLLAIPVEKSVKLYRRESWSHQFDLSDNFISQTLNIVTWSPCGQYLAAGSINGLIIVWNVETKDCMERVKHEKGYAICGLAWHPTCGRISYTDAEGNLGLLENVCDPSGKTSSSKVSSRVEKDYNDLFDGDDMSNAGDFLNDNAVEIPSFSKGIINDDEDDEDLMMASGRPRQRSHILEDDENSVDISMLKTGSSLLKEEEEDGQEGSIHNLPLVTSQRPFYDGPMPTPRQKPFQSGSTPLHLTHRFMVWNSIGIIRCYNDEQDNAIDVEFHDTSIHHATHLSNTLNYTIADLSHEAILLACESTDELASKLHCLHFSSWDSSKEWIIDLPQNEDIEAICLGQGWAAAATSALLLRLFTIGGVQKEVFSLAGPVVSMAGHGEQLFIVYHRGTGFDGDQCLGVQLLELGKKKKQILHGDPLPLTRKSYLAWIGFSAEGTPCYVDSEGIVRMLNRGLGNTWTPICNTREHCKGKSDHYWVVGIHENPQQLRCIPCKGSRFPPTLPRPAVAILSFKLPYCQIATEKGQMEEQFWRSVIFHNHLDYLAKNGYEYEESTKNQATKEQQELLMKMLALSCKLEREFRCVELADLMTQNAVNLAIKYASRSRKLILAQKLSELAVEKAAELTATQVEEEEEEEDFRKKLNAGYSNTATEWSQPRFRNQVEEDAEDSGEADDEEKPEIHKPGQNSFSKSTNSSDVSAKSGAVTFSSQGRVNPFKVSASSKEPAMSMNSARSTNILDNMGKSSKKSTALSRTTNNEKSPIIKPLIPKPKPKQASAASYFQKRNSQTNKTEEVKEENLKNVLSETPAICPPQNTENQRPKTGFQMWLEENRSNILSDNPDFSDEADIIKEGMIRFRVLSTEERKVWANKAKGETASEGTEAKKRKRVVDESDETENQEEKAKENLNLSKKQKPLDFSTNQKLSAFAFKQE

SEQ ID NO: 939 - DNA, 2512 bp, Homo sapien
cttgtctcccctggtttgtgaagtgcggaaaaccagaggcgcagtcatgtcgggattcgacgatcctggcattttctacagcgacagcttcgggggcgacgcccaggccgacgaggggcaggcccgcaaatcgcagctgcagaggcgcttcaaggagttcctgcggcagtaccgagtgggcaccgaccgcacgggcttcaccttcaaatacagggatgaactcaagcggcattacaacctgggggagtactggattgaggtggagatggaggatctggccagctttgatgaggacctggccgactacttgtacaagcagccagccgagcacctgcagctgctggaggaagctgccaaggaggtagctgatgaggtgacccggccccggccttctggggaggaggtgctccaggacatccaggtcatgctcaagtcggacgccagcccttccagcattcgtagcctgaagtcggacatgatgtcacacctggtgaagatccctggcatcatcatcgcggcctctgcggtccgtgccaaggccacccgcatctctatccagtgccgcagctgccgcaacaccctcaccaacattgccatgcgccctggcctcgagggctatgccctgcccaggaagtgcaacacagatcaggctgggcgccccaaatgcccattggacccgtacttcatcatgcccgacaaatgcaaatgcgtggacttccagaccctgaagctgcaggagctgcctgatgcagtcccccacggggagatgcccagacacatgcagctctactgcgacaggtacctgtgtgacaaggtcgtccctgggaacagggttaccatcatgggcatctactccatcaagaagtttggcctgaccaccagcaggggccgtgacagggtgggcgtgggcatccgaagctcctacatccgtgtcctgggcatccaggtggacacagatggctctggccgcagctttgctggggccgtgagcccccaggaggaggaggagttccgtcgcctggctgccctcccaaatgtctatgaggtcatctccaagagcatcgccccctccatctttgggggcacagacatgaagaaggccattgcctgcctgctctttgggggctcccgaaagaggctccctgatggacttactcgccgaggagacatcaacctgctgatgctaggggaccctgggacagccaagtcccagcttctgaagtttgtggagaagtgttctcccattggggtatacacgtctgggaaaggcagcagcgcagctggactgacagcctcggtgatgagggacccttcgtcccggaatttcatcatggagggcggagccatggtcctggccgatggtggggtcgtctgtattgacgagtttgacaagatgcgagaagatgaccgtgtggcaatccacgaagccatggagcagcagaccatctctatcgccaaggctgggatcaccaccaccctgaactcccgctgctccgtcctggctgctgccaactcagtgttcggccgctgggatgagacgaagggggaggacaacattgacttcatgcccaccatcttgtcgcgcttcgacatgatcttcatcgtcaaggatgagcacaatgaggagagggatgtgatgctggccaagcatgtcatcactctgcacgtgagcgcactgacacagacacaggctgtggagggcgagattgacctggccaagctgaagaagtttattgcctactgccgagtgaaatgtggcccccggctgtcagcagaggctgcagagaaactgaagaaccgctacatcatcatgcggagcggggcccgtcagcacgagagggacagtgaccgccgctccagcatccccatcactgtgcggcagctggaggccattgtgcgcatcgcggaagccctcagcaagatgaagctgcagcccttcgccacagaggcagatgtggaggaggccctgcggctcttccaagtgtccacgttggatgctgccttgtccggtaccctgtcaggggtggagggcttcaccagccaggaggaccaggagatgctgagccgcatcgagaagcagctcaagcgccgctttgccattggctcccaggtgtctgagcacagcatcatcaaggacttcaccaagcagaaatacccggagcacgccatccacaaggtgctgcagctcatgctgcggcgcggcgagatccagcatcgcatgcagcgcaaggttctctaccgcctcaagtgagtcgcgccgcctcactggactcatggactcgcccacgcctcgcccctcctgccgctgcctgccattgacaatgttgctgggacctctgcctccccactgcagccctcgaacttcccaggcaccctcctttctgccccagaggaaggagctgtagtgtcctgctgcctctgggcgcccgcctctagcgcggttctgggaagtgtgcttttggcatccgttaataataaagccacggtgtgttcaggtaaaaaaaaaaaaaaa

SEQ ID NO: 940 - protein, 734 aa, Homo sapien
MSGFDDPGIFYSDSFGGDAQADEGQARKSQLQRRFKEFLRQYRVGTDRTGFTFKYRDELKRHYNLGEYWIEVEMEDLASFDEDLADYLYKQPAEHLQLLEEAAKEVADEVTRPRPSGEEVLQDIQVMLKSDASPSSIRSLKSDMMSHLVKIPGIIIAASAVRAKATRISIQCRSCRNTLTNIAMRPGLEGYALPRKCNTDQAGRPKCPLDPYFIMPDKCKCVDFQTLKLQELPDAVPHGEMPRHMQLYCDRYLCDKVVPGNRVTIMGIYSIKKFGLTTSRGRDRVGVGIRSSYIRVLGIQVDTDGSGRSFAGAVSPQEEEEFRRLAALPNVYEVISKSIAPSIFGGTDMKKAIACLLFGGSRKRLPDGLTRRGDINLLMLGDPGTAKSQLLKFVEKCSPIGVYTSGKGSSAAGLTASVMRDPSSRNFIMEGGAMVLADGGVVCIDEFDKMREDDRVAIHEAMEQQTISIAKAGITTTLNSRCSVLAAANSVFGRWDETKGEDNIDFMPTILSRFDMIFIVKDEHNEERDVMLAKHVITLHVSALTQTQAVEGEIDLAKLKKFIAYCRVKCGPRLSAEAAEKLKNRYIIMRSGARQHERDSDRRSSIPITVRQLEAIVRIAEALSKMKLQPFATEADVEEALRLFQVSTLDAALSGTLSGVEGFTSQEDQEMLSRIEKQLKRRFAIGSQVSEHSIIKDFTKQKYPEHAIHKVLQLMLRRGEIQHRMQRKVLYRLK

SEQ ID NO: 941 - DNA, 1882 bp, Homo sapien
gaattcgggcgtgggcgcgggggcgcggcgtgcggcacgctgcagggctgaagcggcggcggcggtggggactgcacgtagcccggcgctcggcatggctctcctggtgctcggtctggtgagctgtaccttctttctggcagtgaatggtctgtattcctctagtgatgatgtgatcgaattaactccatcaaatttcaaccgagaagttattcagagtgatagtttgtggcttgtagaattctatgctccatggtgtggtcactgtcaaagattaacaccagaatggaagaaagcagcaactgcattaaaagatgttgtcaaagttggtgcagttgatgcagataagcatcattccctaggaggtcagtatggtgttcagggatttcctaccattaagatttttggatccaacaaaaacagaccagaagattaccaaggtggcagaactggtgaagccattgtagatgctgcgctgagtgctctgcgccagctcgtgaaggatcgcctcgggggacggagcggaggatacagttctggaaaacaaggcagaagtgatagttcaagtaagaaggatgtgattgagctgacagacgacagctttgataagaatgttctggacagtgaagatgtttggatggttgagttctatgctccttggtgtggacactgcaaaaacctagagccagagtgggctgccgcagcttcagaagtaaaagagcagacgaaaggaaaagtgaaactggcagctgtggatgctacagtcaatcaggttctggcctcccgatacgggattagaggatttcctacaatcaagatatttcagaaaggcgagtctcctgtggattatgacggtgggcggacaagatccgacatcgtgtcccgggcccttgatttgttttctgataacgccccacctcctgagctgcttgagattatcaacgaggacattgccaagaggacgtgtgaggagcaccagctctgtgttgtggctgtgctgccccatatccttgatactggagctgcaggcagaaattcttatctggaagttcttctgaagttggcagacaaatacaaaaagaaaatgtgggggtggctgtggacagaagctggagcccagtctgaacttgagaccgcgttggggattggagggtttgggtaccccgccatggccgccatcaatgcacgcaagatgaaatttgctctgctaaaaggctccttcagtgagcaaggcatcaacgagtttctcagggagctctcttttgggcgtggctccacggcacctgtaggaggcggggctttccctaccatcgttgagagagagccttgggacggcagggatggcgagcttcccgtggaggatgacattgacctcagtgatgtggagcttgatgacttagggaaagatgagttgtgagagccacaacagaggcttcagaccattttcttttcttgggagccagtggatttttccagcagtgaagggacattctctactttcttttcttgggagccagtggatttttccagcagtgaagggacattctctacactcagatgactctaccagtggccttttaaccaagaagtagtacttgattggtcatttgaaaacactgcaacagtgaacttttgcatctcaagaaaacattgaaaaattctatgaattgttgtagccggtgaattgagtcgtattctgtcacataatattttgaagaaaacttggctgtcgaaacatttttctctctgactgctgcttgaatgttcttggaggctgtttcttatgtatgggttttttttaatgtgatcccttcatttgaatattaatggctttttccattaaagaataaattggaaaaaagaaaaaaaaaaaaaggaattc

SEQ ID NO: 942 - protein, 440 aa, Homo sapien
MALLVLGLVSCTFFLAVNGLYSSSDDVIELTPSNFNREVIQSDSLWLVEFYAPWCGHCQRLTPEWKKAATALKDVVKVGAVDADKHHSLGGQYGVQGFPTIKIFGSNKNRPEDYQGGRTGEAIVDAALSALRQLVKDRLGGRSGGYSSGKQGRSDSSSKKDVIELTDDSFDKNVLDSEDVWMVEFYAPWCGHCKNLEPEWAAAASEVKEQTKGKVKLAAVDATVNQVLASRYGIRGFPTIKIFQKGESPVDYDGGRTRSDIVSRALDLFSDNAPPPELLEIINEDIAKRTCEEHQLCVVAVLPHILDTGAAGRNSYLEVLLKLADKYKKKMWGWLWTEAGAQSELETALGIGGFGYPAMAAINARKMKFALLKGSFSEQGINEFLRELSFGRGSTAPVGGGAFPTIVEREPWDGRDGELPVEDDIDLSDVELDDLGKDEL

SEQ ID NO: 943 - DNA, 1830 bp, Homo sapien
gcgaccgctcgtccgcccggcttgaggcccgcggggagcgcgccgcaattcgtcggcccgcgggggggcggcctcccggcatcttcgcggcgaccaaggactaccaggaaggggagcggctgggatggcgcgtccgcggccccgcgagtacaaagcgggcgacctggtcttcgccaagatgaagggctacccgcactggccggcccggattgatgaactcccagagggcgctgtgaagcctccagcaaacaagtatcctatcttcttttttggcacccatgaaactgcatttctaggtcccaaagacctttttccatataaggagtacaaagacaagtttggaaagtcaaacaaacggaaaggatttaacgaaggattgtgggaaatagaaaataacccaggagtaaagtttactggctaccaggcaattcagcaacagagctcttcagaaactgagggagaaggtggaaatactgcagatgcaagcagtgaggaagaaggtgatagagtagaagaagatggaaaaggcaaaagaaagaatgaaaaagcaggctcaaaacggaaaaagtcatatacttcaaagaaatcctctaaacagtcccggaaatctccaggagatgaagatgacaaagactgcaaagaagaggaaaacaaaagcagctctgagggtggagatgcgggcaacgacacaagaaacacaacttcagacttgcagaaaaccagtgaagggacctaactaccataatgaatgctgcatattaagagaaaccacaagaaggttatatgtttggttgtctaatattcttggatttgatatgaaccaacacatagtccttgttgtcattgacagaaccccagtttgtatgtacattattcatattcctctctgttgtgtttcggggggaaaagacattttagccttttttaaaagttactgatttaatttcatgttatttggttgcatgaagttgcccttaaccactaaggattatcaagatttttgcgcagacttatacatgtctaggatccttttatcaaggcagttatgatcatcgttttcctgccttgaccccaccatcatcaaacactcagttaaatataaattaacattttttagatgaccactcaacataatgcttaagaatggaatttcctctctgtgacagaacccaggaattaattcctaaatacataacgttggtatattgaagacgaaattaaaattggtccttcagttttgaggccatgtgtaaagtttaaccatattgtaaaatatctattccgtattagaaatagctagttgacagcttatacttctcaacattcatattgttatgtacacaaactaagtttctatatgtgaagttagtgagtctttttgtgttactccaaaataaaggcaatgatttatttttttcccagtgccaatacaattttgagctaagcactcaaggtggatactttacattttaaagctggaatcagcaacagccctatgggaaaccagacaaagcattgacttttaaatgtagacttttaaaataaactgttttcttttggaactacaattagaatagttaatattcatccttaaaccattattatgtgtacattattgttgctattgtgataatagagaattttatttatttttatgccagcttatattgtgagaacacatttagtcagtttgggttttatcaatcctgttaatgcttgtccttggaacatctttcgcgtattcacggtttgtagttgaaaagtttactgtaaaaaaatcaaaaacaaaaaaatgtattgtttttacagaataaatttattggaatgtga

SEQ ID NO: 944 - protein, 203 aa, Homo sapien; identical to SEQ ID NO: 657

SEQ ID NO: 945 - DNA, 4530 bp, Homo sapien
aattctcgagctcgtcgaccggtcgacgagctcgagggtcgacgagctcgagggcgcgcgcccggcccccacccctcgcagcaccccgcgccccgcgccctcccagccgggtccagccggagccatggggccggagccgcagtgagcaccatggagctggcggccttgtgccgctgggggctcctcctcgccctcttgccccccggagccgcgagcacccaagtgtgcaccggcacagacatgaagctgcggctccctgccagtcccgagacccacctggacatgctccgccacctctaccagggctgccaggtggtgcagggaaacctggaactcacctacctgcccaccaatgccagcctgtccttcctgcaggatatccaggaggtgcagggctacgtgctcatcgctcacaaccaagtgaggcaggtcccactgcagaggctgcggattgtgcgaggcacccagctctttgaggacaactatgccctggccgtgctagacaatggagacccgctgaacaataccacccctgtcacaggggcctccccaggaggcctgcgggagctgcagcttcgaagcctcacagagatcttgaaaggaggggtcttgatccagcggaacccccagctctgctaccaggacacgattttgtggaaggacatcttccacaagaacaaccagctggctctcacactgatagacaccaaccgctctcgggcctgccacccctgttctccgatgtgtaagggctcccgctgctggggagagagttctgaggattgtcagagcctgacgcgcactgtctgtgccggtggctgtgcccgctgcaaggggccactgcccactgactgctgccatgagcagtgtgctgccggctgcacgggccccaagcactctgactgcctggcctgcctccacttcaaccacagtggcatctgtgagctgcactgcccagccctggtcacctacaacacagacacgtttgagtccatgcccaatcccgagggccggtatacattcggcgccagctgtgtgactgcctgtccctacaactacctttctacggacgtgggatcctgcaccctcgtctgccccctgcacaaccaagaggtgacagcagaggatggaacacagcggtgtgagaagtgcagcaagccctgtgcccgagtgtgctatggtctgggcatggagcacttgcgagaggtgagggcagttaccagtgccaatatccaggagtttgctggctgcaagaagatctttgggagcctggcatttctgccggagagctttgatggggacccagcctccaacactgccccgctccagccagagcagctccaagtgtttgagactctggaagagatcacaggttacctatacatctcagcatggccggacagcctgcctgacctcagcgtcttccagaacctgcaagtaatccggggacgaattctgcacaatggcgcctactcgctgaccctgcaagggctgggcatcagctggctggggctgcgctcactgagggaactgggcagtggactggccctcatccaccataacacccacctctgcttcgtgcacacggtgccctgggaccagctctttcggaacccgcaccaagctctgctccacactgccaaccggccagaggacgagtgtgtgggcgagggcctggcctgccaccagctgtgcgcccgagggcactgctggggtccagggcccacccagtgtgtcaactgcagccagttccttcggggccaggagtgcgtggaggaatgccgagtactgcaggggctccccagggagtatgtgaatgccaggcactgtttgccgtgccaccctgagtgtcagccccagaatggctcagtgacctgttttggaccggaggctgaccagtgtgtggcctgtgcccactataaggaccctcccttctgcgtggcccgctgccccagcggtgtgaaacctgacctctcctacatgcccatctggaagtttccagatgaggagggcgcatgccagccttgccccatcaactgcacccactcctgtgtggacctggatgacaagggctgccccgccgagcagagagccagccctctgacgtccatcgtctctgcggtggttggcattctgctggtcgtggtcttgggggtggtctttgggatcctcatcaagcgacggcagcagaagatccggaagtacacgatgcggagactgctgcaggaaacggagctggtggagccgctgacacctagcggagcgatgcccaaccaggcgcagatgcggatcctgaaagagacggagctgaggaaggtgaaggtgcttggatctggcgcttttggcacagtctacaagggcatctggatccctgatggggagaatgtgaaaattccagtggccatcaaagtgttgagggaaaacacatcccccaaagccaacaaagaaatcttagacgaagcatacgtgatggctggtgtgggctccccatatgtctcccgccttctgggcatctgcctgacatccacggtgcagctggtgacacagcttatgccctatggctgcctcttagaccatgtccgggaaaaccgcggacgcctgggctcccaggacctgctgaactggtgtatgcagattgccaaggggatgagctacctggaggatgtgcggctcgtacacagggacttggccgctcggaacgtgctggtcaagagtcccaaccatgtcaaaattacagacttcgggctggctcggctgctggacattgacgagacagagtaccatgcagatgggggcaaggtgcccatcaagtggatggcgctggagtccattctccgccggcggttcacccaccagagtgatgtgtggagttatggtgtgactgtgtgggagctgatgacttttggggccaaaccttacgatgggatcccagcccgggagatccctgacctgctggaaaagggggagcggctgccccagccccccatctgcaccattgatgtctacatgatcatggtcaaatgttggatgattgactctgaatgtcggccaagattccgggagttggtgtctgaattctcccgcatggccagggacccccagcgctttgtggtcatccagaatgaggacttgggcccagccagtcccttggacagcaccttctaccgctcactgctggaggacgatgacatgggggacctggtggatgctgaggagtatctggtaccccagcagggcttcttctgtccagaccctgccccgggcgctgggggcatggtccaccacaggcaccgcagctcatctaccaggagtggcggtggggacctgacactagggctggagccctctgaagaggaggcccccaggtctccactggcaccctccgaaggggctggctccgatgtatttgatggtgacctgggaatgggggcagccaaggggctgcaaagcctccccacacatgaccccagccctctacagcggtacagtgaggaccccacagtacccctgccctctgagactgatggctacgttgcccccctgacctgcagcccccagcctgaatatgtgaaccagccagatgttcggccccagcccccttcgccccgagagggccctctgcctgctgcccgacctgctggtgccactctggaaagggccaagactctctccccagggaagaatggggtcgtcaaagacgtttttgcctttgggggtgccgtggagaaccccgagtacttgacaccccagggaggagctgcccctcagccccaccctcctcctgccttcagcccagccttcgacaacctctattactgggaccaggacccaccagagcggggggctccacccagcaccttcaaagggacacctacggcagagaacccagagtacctgggtctggacgtgccagtgtgaaccagaaggccaagtccgcagaagccctgatgtgtcctcagggagcagggaaggcctgacttctgctggcatcaagaggtgggagggccctccgaccacttccaggggaacctgccatgccaggaacctgtcctaaggaaccttccttcctgcttgagttcccagatggctggaaggggtccagcctcgttggaagaggaacagcactggggagtctttgtggattctgaggccctgcccaatgagactctagggtccagtggatgccacagcccagcttggccctttccttccagatcctgggtactgaaagccttagggaagctggcctgagaggggaagcggccctaagggagtgtctaagaacaaaagcgacccattcagagactgtccctgaaacctagtactgccccccatgaggaaggaacagcaatggtgtcagtatccaggctttgtacagagtgcttttctgtttagtttttactttttttgttttgtttttttaaagacgaaataaagacccaggggagaatgggtgttgtatggggaggcaagtgtggggggtccttctccacacccactttgtccatttgcaaatatattttggaaaac

SEQ ID NO: 946 - protein, 1255 aa, Homo sapien
MELAALCRWGLLLALLPPGAASTQVCTGTDMKLRLPASPETHLDMLRHLYQGCQVVQGNLELTYLPTNASLSFLQDIQEVQGYVLIAHNQVRQVPLQRLRIVRGTQLFEDNYALAVLDNGDPLNNTTPVTGASPGGLRELQLRSLTEILKGGVLIQRNPQLCYQDTILWKDIFHKNNQLALTLIDTNRSRACHPCSPMCKGSRCWGESSEDCQSLTRTVCAGGCARCKGPLPTDCCHEQCAAGCTGPKHSDCLACLHFNHSGICELHCPALVTYNTDTFESMPNPEGRYTFGASCVTACPYNYLSTDVGSCTLVCPLHNQEVTAEDGTQRCEKCSKPCARVCYGLGMEHLREVRAVTSANIQEFAGCKKIFGSLAFLPESFDGDPASNTAPLQPEQLQVFETLEEITGYLYISAWPDSLPDLSVFQNLQVIRGRILHNGAYSLTLQGLGISWLGLRSLRELGSGLALIHHNTHLCFVHTVPWDQLFRNPHQALLHTANRPEDECVGEGLACHQLCARGHCWGPGPTQCVNCSQFLRGQECVEECRVLQGLPREYVNARHCLPCHPECQPQNGSVTCFGPEADQCVACAHYKDPPFCVARCPSGVKPDLSYMPIWKFPDEEGACQPCPINCTHSCVDLDDKGCPAEQRASPLTSIVSAVVGILLVVVLGVVFGILIKRRQQKIRKYTMRRLLQETELVEPLTPSGAMPNQAQMRILKETELRKVKVLGSGAFGTVYKGIWIPDGENVKIPVAIKVLRENTSPKANKEILDEAYVMAGVGSPYVSRLLGICLTSTVQLVTQLMPYGCLLDHVRENRGRLGSQDLLNWCMQIAKGMSYLEDVRLVHRDLAARNVLVKSPNHVKITDFGLARLLDIDETEYHADGGKVPIKWMALESILRRRFTHQSDVWSYGVTVWELMTFGAKPYDGIPAREIPDLLEKGERLPQPPICTIDVYMIMVKCWMIDSECRPRFRELVSEFSRMARDPQRFVVIQNEDLGPASPLDSTFYRSLLEDDDMGDLVDAEEYLVPQQGFFCPDPAPGAGGMVHHRHRSSSTRSGGGDLTLGLEPSEEEAPRSPLAPSEGAGSDVFDGDLGMGAAKGLQSLPTHDPSPLQRYSEDPTVPLPSETDGYVAPLTCSPQPEYVNQPDVRPQPPSPREGPLPAARPAGATLERAKTLSPGKNGVVKDVFAFGGAVENPEYLTPQGGAAPQPHPPPAFSPAFDNLYYWDQDPPERGAPPSTFKGTPTAENPEYLGLDVPV

SEQ ID NO: 947 - DNA, 2983 bp, Homo sapien; identical to SEQ ID NO: 636

SEQ ID NO: 948 - protein, 289 aa, Homo sapien; identical to SEQ ID NO: 637

SEQ ID NO: 949 - DNA, 1670 bp, Homo sapien
cggcacgaggcaagtgacgccgagggcctgagtgctccagtagccaccgcatctggagaaccagcggttaccatggaggggatcagtatatacacttcagataactacaccgaggaaatgggctcaggggactatgactccatgaaggaaccctgtttccgtgaagaaaatgctaatttcaataaaatcttcctgcccaccatctactccatcatcttcttaactggcattgtgggcaatggattggtcatcctggtcatgggttaccagaagaaactgagaagcatgacggacaagtacaggctgcacctgtcagtggccgacctcctctttgtcatcacgcttcccttctgggcagttgatgccgtggcaaactggtactttgggaacttcctatgcaaggcagtccatgtcatctacacagtcaacctctacagcagtgtcctcatcctggccttcatcagtctggaccgctacctggccatcgtccacgccaccaacagtcagaggccaaggaagctgttggctgaaaaggtggtctatgttggcgtctggatccctgccctcctgctgactattcccgacttcatctttgccaacgtcagtgaggcagatgacagatatatctgtgaccgcttctaccccaatgacttgtgggtggttgtgttccagtttcagcacatcatggttggccttatcctgcctggtattgtcatcctgtcctgctattgcattatcatctccaagctgtcacactccaagggccaccagaagcgcaaggccctcaagaccacagtcatcctcatcctggctttcttcgcctgttggctgccttactacattgggatcagcatcgactccttcatcctcctggaaatcatcaagcaagggtgtgagtttgagaacactgtgcacaagtggatttccatcaccgaggccctagctttcttccactgttgtctgaaccccatcctctatgctttccttggagccaaatttaaaacctctgcccagcacgcactcacctctgtgagcagagggtccagcctcaagatcctctccaaaggaaagcgaggtggacattcatctgtttccactgagtctgagtcttcaagttttcactccagctaacacagatgtaagagacttttttttatacgataaataacttttttttaagttacacatttttcagatataaaagactgaccaatattgtacagtttttattgcttgttggatttttgctcttgtgtttctttagtttttcgtgaaggtttaattgacttatttatataaattttttttgtttcatattgatgtgtgtctaggcaggacctgtggccaagttcttagttgctgtatgtctcgtggtaggactgtagaaaagggaactgaacattccagagcgtgtagtgaatcacgtaaagctagaaatgatccccagctgtttatgcatagataatctctccattcccgtggaacgtttttcctgttcttaagacgtgattttgctgtagaagatggcacttataaccaaagcccaaagtggtatagaaatgctggtttttcagttttcaggagtgggttgatttcagcacctacagtgtacagtcttgtattaagttgttaataaaagtacatgttaaacttaaaaaaaaaaaaaaaaa

SEQ ID NO: 950 - protein, 352 aa, Homo sapien; identical to SEQ ID NO: 629

SEQ ID NO: 951 - DNA, 4656 bp, Homo sapien
aagatggctgcccacgggggctccgcggcgtcctcggcgctgaaggggttaattcaacagttcaccaccattaccggtgcaagtgaaagtgtaggaaaacatatgcttgaagcgtgcaacaataatctggaaatggcagtcactatgtttttggatggtggaggaatcgctgaagagcccagtaccagttcagcaagtgtctctactgtcagaccacacacagaagaagaagttcgtgccccaattcctcaaaagcaggaaatactggtggaaccagaaccattatttggtgctcctaaaagacgacggcctgcacgttcaatttttgatggtttccgggattttcagactgaaactattcggcaagaacaagaattaagaaatggaggagctatcgataagaaattaactacccttgcagatctattccggccacccattgatttgatgcataaaggcagctttgaaacagccaaagagtgtggccagatgcaaaataagtggctgatgataaacattcaaaatgttcaagactttgcatgtcagtgcctcaaccgcgatgtgtggagcaacgaagctgtgaagaatattatccgggaacatttcattttctggcaggtttatcatgacagtgaggaaggtcagagatacatacagttttataagttaggggatttcccctatgtttccatattggacccacggacaggtcagaagctagtagaatggcaccagttagatgtatcttctttcttggaccaagtgacgggatttctgggtgaacatggacaactggatggactttctagcagtccccccaaaaaatgtgcccgttcagagagccttatagatgcaagtgaagacagccagctagaagctgccatcagagcctccttacaagaaacacattttgattcaacacagacaaaacaggatagccgctcagatgaagaatctgaatctgaacttttttctggcagtgaggagttcatatccgtttgtggctctgatgaagaagaagaggtagagaatcttgccaagtccagaaagtctccccacaaagatttggggcatagaaaagaggagaatagaaggccgctgactgagccaccagtcagaactgatcctggaacagccacaaaccaccaaggattgccagctgtggattcagagatactggagatgccacctgaaaaagcagatggagtagtggaggggatagatgtaaatggaccaaaagcacagctgatgttgcggtatccagatggaaaaagggaacagatcactcttccagagcaagctaaactgctagctttggtgaagcacgtgcagtctaaaggatacccaaatgaacgttttgaacttctcaccaactttcctcgaaggaaattatctcatctggactatgatattacattgcaagaggcaggcctttgtcctcaagagactgtctttgtacaggaaagaaattaacaccatggcttgacctctctcagcttaccccttttttcccttttcctgtgagatacatgtcactaagtatgcattttggctcataggaccacagagccaaagttgggcaagcaagtcaccttccttctcttatttcttgatctctcctataatcagtctctttctccccctttgtttctttctcctcttctgttttctcgctccccactccgtacccttctgcctccccctccccccacacttttctttcttacctaatctggtgaccaaactgaagtgtaaggataagacctctcctagtactagcagcaggaattgtgtgttccagtaagtggtctcttgcacggcacttttttgggatcaaatgttaacgttactccccagactcttcgggcaaaggaatggctagattcagagtaagaacaaccctcccttttttgtaagtccccgtgtttagcagggagaagaaattctctaacatgggtttggttttgttgtgttcttcatgtggaaatgtcgcttaacaaaatatccaggcttttgtttacgtggaaaaagcatcccttgtaatgattgctcatcatacttaaaaacctttttcaaaggattttcatgttcccagctataaggactatttccatgacgtgttattggcagaatgagtgttaaatatggagcatatagcatggggtgactttcattgtcctaacctgagacagttttccttattactctgtattgatcctgctagtccaagaatggacatgaagtgaacctatcgtggtgactgggataggaaggtgcttgctatttttgccagcacagcatattagttcctttggagccctccattgtctgagtctgcagtgatctgtaggaaggcagctggtcaataatcatgtagtacaatggcttggaattgtaaccactatggttattgattgtcctgtgttgtttcaggcatacttaggtatgtccctggggaaaaagaaaaccattcagctgagagttgctaaccatgttcttttggttagaaataatggttcattttttgcccctggttggaatagtctctaaaaggctctggtgactgaattgaacatgagtccgcatgctgttttctttcaaaaggtatcaaaacggaaagcctctctaaggggaagacctttcaactccattcagaagacaacatttagtaaggaggatggcggaggttactagtaattttcagatgtcttgggctttttctgccaacaaaacccaaaatcaaattagagttggtgaaagctttcttcagtgtttttagaagaggccatcttgaatctgtagaataccatttacacatcaacttcaccctatgctcatttcgtattttgagcttaaatggagtcctctgaagggggggtagtcgtgattctggtggcaaaactagaacttttaacttgtaaaatgaaaaatattaaatggacctttttgtcagttgaggatttagattgattcttttatctgaggagcgtatgttcctcagatgttgcgtagagacctttaggttttcatctactttaagattgctctcttggcaattaggggatttgggaaaagaagaaaaaaagatgccatgtgttgctagtacacagttataggatatggtttctaatggttgaattttgaggaactctccctaaagaatgagttttatatctcctcaaggaaatcatggaaaaatctgtttattcttcagtgagtccttttgaattaatgttcttaaatttttttctaagtctgtgtaagtgcttatgtataagtatataattgtataaatatttataaatatatttatataattacggtttcatttctaccttgagtcaaagttctgtctttagattggtgactgagtaatacttacactttggtgttttttcttaggttcttgaggcttacttaactagcagcttctgatttattgagtgaaagatggttttcatgttaattcctcagttgcatctctgaacttggataacatacttgccgtttgaaaaatagagctgtatactgtcaaaggtgcactggagggtaaaacatttgttggtagtagacaagctcagaaatccaaaaattcagggagggcacagggtaagaagagaggtttgctcagctttgtgctctgatggcacccatctgtactccagcaaagtcatagctgaagcccaaatcgctcaaacgtgtgaagtcaatcatttttcctatagggctctgtttccttttctttaccttctagcttctcttgataaaacagttgggagaactgccaacgtgttcatcagtgagagggtgtggttctttccgatatgttcagcacgtgcatattcatttatgagaaaccaaagtaacttcttcaactcgggttactgtgggatgattaagtagatataaagtgatttaaaagacagcatggtactttcactcagcttaacatgcagctgggatgtctacaatacaagatgtggtgggttttattttattttattttgaggcaggagtgtaattatcttagggttgatataaaggcccatgggaagagttacggattgtacatgggaagaatccataaggagtattgccttgctcaagaatttaatccgctgacagtatgcttcttccagtttgccttacttcctctgcaagtttctttgctccttagggcagaggttttattgaatagattaaatgaggtcagtaagattagttaaaaatagtcattccttgtgggtgttggacacagcttgaaaggagtgtttaaaaaaaaaaagctagggaggaaaagaacaagaaagatagacttcgagagtgataagagaaaaatacagggagatggaatggaaactaccaggaaggccgggcgcggtggctcatgcctgtaatcccaacactttgggaggcggaggtgggcagatcacctaaggtcaggagatcgaggccagcctgagcaacatggtgaaaccccgtctctactaaaaatacaaaaattacctgggtgtggtggcgtgcacctgtaatcccagctactcagaggctgaggcaggggaatggcttgaacctgggaggcagaggttgcagtgagccaagatcgcaccattacactccagcctgggcgacaaagcgacactccatctcaaattt

SEQ ID NO: 952 - protein, 490 aa, Homo sapien
KMAAHGGSAASSALKGLIQQFTTITGASESVGKHMLEACNNNLEMAVTMFLDGGGIAEEPSTSSASVSTVRPHTEEEVRAPIPQKQEILVEPEPLFGAPKRRRPARSIFDGFRDFQTETIRQEQELRNGGAIDKKLTTLADLFRPPIDLMHKGSFETAKECGQMQNKWLMINIQNVQDFACQCLNRDVWSNEAVKNIIREHFIFWQVYHDSEEGQRYIQFYKLGDFPYVSILDPRTGQKLVEWHQLDVSSFLDQVTGFLGEHGQLDGLSSSPPKKCARSESLIDASEDSQLEAAIRASLQETHFDSTQTKQDSRSDEESESELFSGSEEFISVCGSDEEEEVENLAKSRKSPHKDLGHRKEENRRPLTEPPVRTDPGTATNHQGLPAVDSEILEMPPEKADGVVEGIDVNGPKAQLMLRYPDGKREQITLPEQAKLLALVKHVQSKGYPNERFELLTNFPRRKLSHLDYDITLQEAGLCPQETVFVQERN

SEQ ID NO: 953 - DNA, 2735 bp, Homo sapien
ggagggcccggcggcgacagcggaggcagagaggaaggcggttctgagagcttcagagagcgatggaaagcaaaatgggtgaattgcctttagacatcaacatccaggaacctcgctgggaccaaagtactttcctgggcagagcccggcactttttcactgttactgatcctcgaaatctgctgctgtccggggcacagctggaagcttctcggaacatcgtgcagaactacagggccggcgtggtgaccccagggatcaccgaggaccagctgtggagggccaagtatgtgtatgactccgccttccatccggacacaggggagaaggtggtcctgattggccgcatgtcagcccaggtgcccatgaacatgaccatcactggctgcatgctcacattctacaggaagaccccaaccgtggtgttctggcagtgggtgaatcagtccttcaatgccattgttaactactccaaccgcagtggtgacactcccatcactgtgaggcagctggggacagcctatgtgagtgccaccactggagctgtggccacggccctgggactcaaatccctcaccaagcacctgccccccttggtcggcagatttgtgccctttgcagcagtggcagctgccaactgcatcaacatccccctgatgaggcagagagagctgcaggtgggcatcccggtggctgatgaggcaggtcagaggcttggctactcggtgactgcagccaagcagggaatcttccaggtggtgatttcaagaatctgcatggcgattcctgccatggccatcccaccactgatcatggacactctggagaagaaagacttcctgaagcgccgcccctggctgggggcacccctgcaggtgggactggtgggcttctgcctggtatttgcaacccccctgtgctgtgccctattcccccagaagagctccatacacataagcaacctggaaccagagctgagagctcagatccatgagcaaaaccccagcgttgaagtggtctactacaacaaggggctttgaggagggtcagcctctgtcccctccctcacttccttgggctgctgctttagtggagtcatgtcacccctaccacttggctatctgcctagcactgggcaggggccttggtgggcagatggcaattgagggtagcaacctattagggtgggggagggacctccataaggcttttcctcccttctctggtttcaaagatcagagcacataacccctcctgtgcttgagtgtccatgcatatacatacatgatacacatgtgtatgtgtacattgggtcctgaaagctagaagcaggcatgctagcctagtatgttctgacatctggcttcccttctcagcctcatgtccacctgcctgccagccaggctacaggtgtgacttccttctctaaactgttacaccagccaagttatttttgatggcacctcatcccttctagaaataggaggagccccaggatctcaggacagagacttatagacactagtaggacaaagcgggctgaatccttcaggtttctgatacctagctccccaagctgactgggctggcagaggagaacatgttgagacaagggaggcaggggacttatgcatccctcagtgccatcccttgtatcctggaatagctccatttcccctcctcctctctaccagacaaaggagtgcctgtgtcctgtactgccctcgctgtctcccccaccaccctacttgacagcgtgggcatcttcaggcacagccttgggagttcctggtgtgctctgacatcatgacctcaaatctaaatcctccaatcccaactccctttcccaaacaaaaagccacagaggcagagcaagcattcccctttaagagcttccactgcaccccctcccaagggacacagcggtaggaatggtgcttaaactccacaggtatcagagagggtgtaactaggacatcctcaagggcagctaggccccgaatgtacaatgttaagacagggaattttgtgttccattgacttttttttttttttttaatggagtttcactattttgcccaggctggagtgcgatggtgcgatcttggctcactgcaacctctgcctcctgggttcaagtgattctcttgcctcagtctcccgagtagtggaaattacaggtgtgtgctaccacatcttgctagttttgtatttttagcagagatgggggtttcaccatgttggccaggctagtctcgaactcctgacctcaggtgatccacctgccttggcctcccaaagcactgggattacaagcatgagccactgtgcccagcctgttccactgacatttcttagacattcagcaaaacccccaccttaacctcttttctttcttgagggttggtcctgtccccacctccaccctcccaccccctggaagaggaagggcccgggcatcagtggctagtccaaataaaatatgggcttggggatggaatgggtggtggtaagttcacagagtgtagttagatcccaactcccatgacctctggcttcagtggtgggtggggcagggcagatgaaagggcttcagtgggaacctctgagagcattttcctgttccccctatcaaccgcccccagtgataacatctgtgaagccagccattactcaataaactgcaaacttgtctaaaaaaaaaaaaaaaaaaaaaaaaaaaaaaaaaaaaaaaa

SEQ ID NO: 954 - protein, 321 aa, Homo sapien
MGELPLDINIQEPRWDQSTFLGRARHFFTVTDPRNLLLSGAQLEASRNIVQNYRAGVVTPGITEDQLWRAKYVYDSAFHPDTGEKVVLIGRMSAQVPMNMTITGCMLTFYRKTPTVVFWQWVNQSFNAIVNYSNRSGDTPITVRQLGTAYVSATTGAVATALGLKSLTKHLPPLVGRFVPFAAVAAANCINIPLMRQRELQVGIPVADEAGQRLGYSVTAAKQGIFQVVISRICMAIPAMAIPPLIMDTLEKKDFLKRRPWLGAPLQVGLVGFCLVFATPLCCALFPQKSSIHISNLEPELRAQIHEQNPSVEVVYYNKGL

SEQ ID NO: 955 - DNA, 1539 bp, Homo sapien
  Unsure 1536: Unknown base
tgcaggagttcatgatcctcccagtcggtgcagcaaacttcagggaagccatgcgcattggagcagaggtttaccacaacctgaagaatgtcatcaaggagaaatatgggaaagatgccaccaatgtgggggatgaaggcgggtttgctcccaacatcctggagaataaagaaggcctggagctgctgaagactgctattgggaaagctggctacactgataaggtggtcatcggcatggacgtagcggcctccgagttcttcaggtctgggaagtatgacctggacttcaagtctcccgatgaccccagcaggtacatctcgcctgaccagctggctgacctgtacaagtccttcatcaaggactacccagtggtgtctatcgaagatccctttgaccaggatgactggggagcttggcagaagttcacagccagtgcaggaatccaggtagtgggggatgatctcacagtgaccaacccaaagaggatcgccaaggccgtgaacgagaagtcctgcaactgcctcctgctcaaagtcaaccagattggctccgtgaccgagtctcttcaggcgtgcaagctggcccaggccaatggttggggcgtcatggtgtctcatcgttcgggggagactgaagataccttcatcgctgacctggttgtggggctgtgcactgggcagatcaagactggtgccccttgccgatctgagcgcttggccaagtacaaccagctcctcagaattgaagaggagctgggcagcaaggctaagtttgccggcaggaacttcagaaaccccttggccaagtaagctgtgggcaggcaagccttcggtcacctgttggctacacagacccctcccctcgtgtcagctcaggcagctcgaggcccccgaccaacacttgcaggggtccctgctagttagcgccccaccgccgtggagttcgtaccgcttccttagaacttctacagaagccaagctccctggagccctgttggcagctctagcttttgcagtcgtgtaatgggcccaagtcattgtttttctcgcctcactttccaccaagtgtctagagtcatgtgagcctcgtgtcatctccggggtggccacaggctagatccccggtggttttgtgctcaaaataaaaagcctcagtgacccatgagacggagatctcgccggctttacgttcacctcggtgtctgcagcaccctccgcttcctctcctaggcgacgagacccagtggctagaagttcaccatgtctattctcaagatccatgccagggagatctttgactctcgcgggaatcccactgttgaggttgatctcttcacctcaaaataaaaagcctcagtgaccctgcatttgagggttcagcagcatataccttcacactaggtttcagagcctgggaagaggaatattaagacatcttaacaacaaaccacaacattgcctgcatgtctaaaagaaaatatgggcctggtgtggtggctcacacctgtaatcccaacactttgggagcccgagncag

SEQ ID NO: 956 - DNA, 2183 bp, Homo sapien
ccagggcctgactaaacctggagactcgggtggccgaggggcttcataccagctgaagagcgacaagccgctggcagccgcggatctcaccgccgctcagggtttttagaacttcagccataaaaatgggcagaattttccttgatcatatcggtggtacccgtctgttttcttgtgcaaactgtgatacgatcctgaccaaccgctcagaactcatctccactcgtttcacaggcgccactggcagagcatttctttttaacaaggtagttaacctgcagtacagcgaagttcaagatcgggtcatgctcactggccgccacatggttcgagatgtgagctgcaaaaactgcaatagcaaactgggatggatctatgagtttgccactgaagacagccagcgatataaggaaggccgcgtgatcctggaacgtgctctagttcgagagagtgagggctttgaggagcatgtaccatctgataactcttgaagatacagagagaaatccatcttttcccaggtctccttcactgaaaacaaaaatctacttacatacactgtcaccttagcatcagagtcggattaatgaactgcggaacaagaggttgtgagaatctaagatggaacctttctttctttctttctttttttttaaattttgtattttccatccaacagcagtgtgtagagagaatattatgcagatgccgttaattttttaccctatgtttacatcttgaggcagcagagtctgtctgcagctatgtggtgagctatgtaaggaaaaaaatctgggctgttagagtgaaaaagtgtgttttatgtcaattgtgaaaggaaaatgttaggagtatggtttttaaacttgggcttcattttaaacttttttttttaaacccagttatttcacttgatttgctagcttcagagaagagatccgaatctgtgcccagcgctaaaggctcagtgttagcatggcttgtgctggccggtgtgccatattcttgttggagatgaaccgtagcaccagagcccattcttccttgtcagtcttggcccaaagatgtcaccattcctagttatttgtcaccacataattggtgttgattggaaactttttctgagatgggacagaactgctgggttgtctttttccatgtaacttaagcatagtaatataaataaagtaatagttggatgcttttggtcctgtgttgcttttaaaaacaccttataaaagaggagagtatttgataagcaattttcatagtagtaaagttttttttcatctcttaaactaaattgaccatgcatataatattctttgtttaaatgaaagcatactgttgaaacccgcagtgttgcatttagaaaacagttgaacagaatgtcaatgtgcattcatgcaaaaaaacatttaatctgcatctgttttagaaaagggggaaatgaagcaacttgtctaaaaatactgctttacaaagcatttcagcctttccccctcagttttgcattgattttttgacaagtctgtagagcctaatagtttccatcaaaggcctagatctcttatttagcatttttttcagctcttctctcagaagttcagctgttgaaacgaaaactgtactttgtaccctcacatacaaagggatcaaatttgacctggtgttattttagccccaaatttatgacattacacaatattaaaatgtaaatgtttctttacccaaactacttctagatattctagtatttgcttctggtggaattaaatgacggtaaaattggctaattatttgaatgaatgaatggatggatgttttgcatgctcaatttctaggtcctttgtctagaaaggaaatttgcctcagttgaattagtgaaatatttctgtcgttgatattaaaagtgacttctgagtacagttaagttcctcctatttgccactgggctgttggttagaagcataggtaactgattaagtaggtatgatactgcatttgaaataagtggacacaaactatcctttctccaccatggactcaatctgagaacaacagcattcatttccattcatttccatactggcttttgattatatgcagattcctagtagcatgccttacctacagcactatgtgcatttgctgtcacaataaagtatattttgtcttgcaaa

SEQ ID NO: 957 - protein, 121 aa, Homo sapien
MGRIFLDHIGGTRLFSCANCDTILTNRSELISTRFTGATGRAFLFNKVVNLQYSEVQDRVMLTGRHMVRDVSCKNCNSKLGWIYEFATEDSQRYKEGRVILERALVRESEGFEEHVPSDNS

SEQ ID NO: 958 - DNA, 1610 bp, Homo sapien
ggcacgagggagagaactagtctcgagtttttttttttttttttttgacaagatggcggcaggaggcagtggcgttggtgggaagcgcagctcgaaaagcgatgccgattctggtttcctggggctgcggcccacttcggtggacccagcgctgaggcggcggcggcgaggcccaagaaataagaagcggggctggcggcggcttgctcaggagccgctggggctggaggttgaccagttcctggaagacgtgcggctacaggagcgcacgagcggtggcttgttgtcagaggccccaaatgaaaaactcttcttcgtggacactggctccaaggaaaaagggctgacaaagaagagaaccaaagtccagaagaagtcactgcttctcaagaaaccccttcgggttgacctcatcctcgagaacacatccaaagtccctgcccccaaagacgtcctcgcccaccaggtccccaacgccaagaagctcaggcggaaggagcagctatgggagaagctggccaagcagggcgagctgccccgggaggtgcgcagggcccaggcccggctcctcaacccttctgcaacaagggccaagcccgggccccaggacaccgtagagcggcccttctacgacctctgggcctcagacaaccccctggacaggccgttggttggccaggatgagtttttcctggagcagaccaagaagaaaggagtgaagcggccagcacgcctgcacaccaagccgtcccaggcgcccgccgtggaggtggcgcctgccggagcttcctacaatccatcctttgaagaccaccagaccctgctctcagcggcccacgaggtggagttgcagcggcagaaggaggcggagaagctggagcggcagctggccctgcccgccacggagcaggccgccacccaggagtccacattccaggagctgtgcgaggggctgctggaggagtcggatggtgagggggagccaggccagggcgaggggccggaggctggggatgccgaggtctgtcccacgcccgcccgcctggccaccacagagaagaagacggagcagcagcggcggcgggagaaggctgtgcacaggctgcgggtacagcaggccgcgttgcgggccgcccggctccggcaccaggagctgttccggctgcgcgggatcaaggcccaggtggccctgaggctggcggagctggcgcggcggcggaggcggcggcaggcgcggcgggaggctgaggctgacaagccccgaaggctgggacggctcaagtaccaggcacctgacatcgacgtgcagctgagctcggagctgacagactcgctcaggaccctgaagcccgagggcaacatccttcgagaccggttcaagagcttccagaggaggaatatgatcgagcctcgagagagagccaagttcaaacgcaagtacaaggtgaagctggtggagaagcgggcgttccgtgagatccagttgtagctgccatcagatgccggagactcgcccttcaataaaaaatctcttctagctgaaaaaaaaaaaaaaaaaaaaaaaaaaaaaaaaaaaaaaaaaaaaaaaaaaaaaaaaaaaaaaaaaaaaa

SEQ ID NO: 959 - protein, 478 aa, Homo sapien
MAAGGSGVGGKRSSKSDADSGFLGLRPTSVDPALRRRRRGPRNKKRGWRRLAQEPLGLEVDQFLEDVRLQERTSGGLLSEAPNEKLFFVDTGSKEKGLTKKRTKVQKKSLLLKKPLRVDLILENTSKVPAPKDVLAHQVPNAKKLRRKEQLWEKLAKQGELPREVRRAQARLLNPSATRAKPGPQDTVERPFYDLWASDNPLDRPLVGQDEFFLEQTKKKGVKRPARLHTKPSQAPAVEVAPAGASYNPSFEDHQTLLSAAHEVELQRQKEAEKLERQLALPATEQAATQESTFQELCEGLLEESDGEGEPGQGEGPEAGDAEVCPTPARLATTEKKTEQQRRREKAVHRLRVQQAALRAARLRHQELFRLRGIKAQVALRLAELARRRRRRQARREAEADKPRRLGRLKYQAPDIDVQLSSELTDSLRTLKPEGNILRDRFKSFQRRNMIEPRERAKFKRKYKVKLVEKRAFREIQL

SEQ ID NO: 960 - DNA, 1282 bp, Homo sapien
gggctctctccttgtcagtcggcgccgcgtgcgggctggtggctctgtggcagcggcggcggcaggactccggcactatgagcggcttcagcaccgaggagcgcgccgcgcccttctccctggagtaccgagtcttcctcaaaaatgagaaaggacaatatatatctccatttcatgatattccaatttatgcagataaggatgtgtttcacatggtagttgaagtaccacgctggtctaatgcaaaaatggagattgctacaaaggaccctttaaaccctattaaacaagatgtgaaaaaaggaaaacttcgctatgttgcgaatttgttcccgtataaaggatatatctggaactatggtgccatccctcagacttgggaagacccagggcacaatgataaacatactggctgttgtggtgacaatgacccaattgatgtgtgtgaaattggaagcaaggtatgtgcaagaggtgaaataattggcgtgaaagttctaggcatattggctatgattgacgaaggggaaaccgactggaaagtcattgccattaatgtggatgatcctgatgcagccaattataatgatatcaatgatgtcaaacggctgaaacctggctacttagaagctactgtggactggtttagaaggtataaggttcctgatggaaaaccagaaaatgagtttgcgtttaatgcagaatttaaagataaggactttgccattgatattattaaaagcactcatgaccattggaaagcattagtgactaagaaaacgaatggaaaaggaatcagttgcatgaatacaactttgtctgagagccccttcaagtgtgatcctgatgctgccagagccattgtggatgctttaccaccaccctgtgaatctgcctgcacagtaccaacagacgtggataagtggttccatcaccagaaaaactaatgagatttctctggaatacaagctgatattgctacatcgtgttcatctggatgtattagaagtaaaagtagtagcttttcaaagctttaaatttgtagaactcatctaactaaagtaaattctgctgtgactaatccaatatactcagaatgttatccatctaaagcatttttcatatctcaactaagataacttttagcacatgcttaaatatcaaagcagttgtcatttggaagtcacttgtgaatagatgtgcaaggggagcacatattggatgtatatgttaccatatgttaggaaataaaattattttgctgaaaaaaaaaaaaaaaaaa

SEQ ID NO: 961 - protein, 289 aa, Homo sapien
MSGFSTEERAAPFSLEYRVFLKNEKGQYISPFHDIPIYADKDVFHMVVEVPRWSNAKMEIATKDPLNPIKQDVKKGKLRYVANLFPYKGYIWNYGAIPQTWEDPGHNDKHTGCCGDNDPIDVCEIGSKVCARGEIIGVKVLGILAMIDEGETDWKVIAINVDDPDAANYNDINDVKRLKPGYLEATVDWFRRYKVPDGKPENEFAFNAEFKDKDFAIDIIKSTHDHWKALVTKKTNGKGISCMNTTLSESPFKCDPDAARAIVDALPPPCESACTVPTDVDKWFHHQKN

SEQ ID NO: 962 - DNA, 1721 bp, Homo sapien
agacgggctgcaagagggagccggcccgacgcggaccgcttccctgcagtgccccgagtcccgggcccgcgccgccgccgcccggctccgctcgcggcccctctgtctgcaggcgtgccccggcggcggcggagagccgtcctcggccgaggaggctgggaaacgcgagcgcaggcggcagagaggcctcaacgccgtccctttcgccaccgccttttccttgcctcgcgccgctgtgcatttctctccttttcctttgtttttttggcccctcgcgggtgtgggcattgttggttagcaaaagtgcagcctcaagatggctgatggcaacgaggatctgcgggctgacgacttgcctgggccagccttcgagagctatgagtccatggagcttgcctgccccgctgagcgcagcggccacgtagccgtcagcgacgggcgccacatgttcgtctggggcggctacaagagtaatcaagtcagaggattatatgacttttatctgcctagagaagaactatggatctacaacatggagactggaagatggaaaaaaatcaacactgaaggtgatgttcctccttctatgtcaggaagctgtgctgtgtgtgtagacagggtgctgtacttgtttggaggacaccattcaagaggcaataccaataagttctacatgctggattcaaggtctacagacagagtgttacagtgggaaagaattgattgccaaggaattcctccatcatcaaaggacaaacttggtgtctgggtatataaaaacaagttaatattttttggagggtatggatatttgcctgaagataaagtattgggaacttttgaattcgatgaaacatctttttggaattcaagtcatccaagaggatggaatgatcatgtacatattttagatactgaaacatttacctggagccagcctataactactggtaaagcaccttcacctcgtgctgcccatgcctgtgcaactgtcggaaatagaggcttcgtgtttggaggcaggtatcgagatgctagaatgaatgatcttcactatcttaatctggatacatgggagtggaatgaattaattccacaaggcatatgcccagttggtcgatcttggcactcactaacaccagtttcttcagatcatctttttctctttggaggatttaccactgataaacagccactaagtgatgcctggacttactgcatcagtaaaaatgaatggatacaatttaatcatccatataccgaaaaaccaaggttatggcacacagcttgtgccagcgatgaaggagaagtaattgtttttggtggatgtgccaacaacttgcttgtccatcacagagctgcacacagtaatgaaatactaatattttcagttcaaccaaaatctcttgtacggctaagcttagaagcagtcatttgctttaaagaaatgttagccaactcatggaactgccttccaaaacacttacttcacagtgttaatcagaggtttggtagtaacaacacttctggatcttaaggcttcataaataatgcctatgatcaccttgcatggacagcaatcctgtaaacatcacagagtggcatcatttgtataattatatgcattgttgtagtttgcacctgttggttttaatgtgcatgtgaatggcctagagaacctatttttgtgtctaaagtttacaataaatgtatttaacacc

SEQ ID NO: 963 - protein, 406 aa, Homo sapien
MADGNEDLRADDLPGPAFESYESMELACPAERSGHVAVSDGRHMFVWGGYKSNQVRGLYDFYLPREELWIYNMETGRWKKINTEGDVPPSMSGSCAVCVDRVLYLFGGHHSRGNTNKFYMLDSRSTDRVLQWERIDCQGIPPSSKDKLGVWVYKNKLIFFGGYGYLPEDKVLGTFEFDETSFWNSSHPRGWNDHVHILDTETFTWSQPITTGKAPSPRAAHACATVGNRGFVFGGRYRDARMNDLHYLNLDTWEWNELIPQGICPVGRSWHSLTPVSSDHLFLFGGFTTDKQPLSDAWTYCISKNEWIQFNHPYTEKPRLWHTACASDEGEVIVFGGCANNLLVHHRAAHSNEILIFSVQPKSLVRLSLEAVICFKEMLANSWNCLPKHLLHSVNQRFGSNNTSGS

SEQ ID NO: 964 - DNA, 1192 bp, Homo sapien
cggcgactgaccgtggtcgtgggcggacggcggcttgcagcgtggaggagctggggtcgctgtgggtcgcgaagcagagcccgggacgtgcgcgcttggtgcacgatcctgaaggggagctccgaggggcccgggtcgccagggctgctgcggccattcccggagcccggcgcggggcccgcgagatactggtttaggccgtcccagggctccgggcgcacccggtggccgctgctgcagcggagggagcgcggcggcgcgggggctcggagacagcgtttctcccggaagtcttcctcgggcagcaggtgggaagtgggagccggagcggcagctggcagcgttctctccgcaggtcggcaccatgcgccctgcagccctgcgcggggccctgctgggctgcctctgcctggcgttgctttgcctgggcggtgcggacaagcgcctgcgtgacaaccatgagtggaaaaaactaattatggttcagcactggcctgagacagtatgcgagaaaattcaaaacgactgtagagaccctccggattactggacaatacatggactatggcccgataaaagtgaaggatgtaatagatcgtggcccttcaatttagaagagattaaggatcttttgccagaaatgagggcatactggcctgacgtaattcactcgtttcccaatcgcagccgcttctggaagcatgagtgggaaaagcatgggacctgcgccgcccaggtggatgcgctcaactcccagaagaagtactttggcagaagcctggaactctacagggagctggacctcaacagtgtgcttctaaaattggggataaaaccatccatcaattactaccaagttgcagattttaaagatgcccttgccagagtatatggagtgatacccaaaatccagtgccttccaccaagccaggatgaggaagtacagacaattggtcagatagaactgtgcctcactaagcaagaccagcagctgcaaaactgcaccgagccgggggagcagccgtcccccaagcaggaagtctggctggcaaatggggccgccgagagccggggtctgagagtctgtgaagatggcccagtcttctatcccccacctaaaaagaccaagcattgatgcccaagttttggaaatattctgttttaaaaagcaagagaaattcacaaactgcag

SEQ ID NO: 965 - protein, 256 aa, Homo sapien
MRPAALRGALLGCLCLALLCLGGADKRLRDNHEWKKLIMVQHWPETVCEKIQNDCRDPPDYWTIHGLWPDKSEGCNRSWPFNLEEIKDLLPEMRAYWPDVIHSFPNRSRFWKHEWEKHGTCAAQVDALNSQKKYFGRSLELYRELDLNSVLLKLGIKPSINYYQVADFKDALARVYGVIPKIQCLPPSQDEEVQTIGQIELCLTKQDQQLQNCTEPGEQPSPKQEVWLANGAAESRGLRVCEDGPVFYPPPKKTKH

SEQ ID NO: 966 - DNA, 1192 bp, Homo sapien; identical to SEQ ID NO: 964

SEQ ID NO: 967 - protein, 256 aa, Homo sapien; identical to SEQ ID NO: 965

SEQ ID NO: 968 - DNA, 1760 bp, Homo sapien
gaattccgagctttttattcctaagaggagaaaatcagtaacgggagaagcaggaggatgtccagaagaaatttcatcccttgctctcgcccctactctttctggtgttagatcgagctaccctctaaaagcagtttagagtggtaaaaaaaaaaaaaacacaccaaacgctcgcagccacaaaagggatgaaatttcttctggacatcctcctgcttctcccgttactgatcgtctgctccctagagtccttcgtgaagctttttattcctaagaggagaaaatcagtcaccggcgaaatcgtgctgattacaggagctgggcatggaattgggagactgactgcctatgaatttgctaaacttaaaagcaagctggttctctgggatataaataagcatggactggaggaaacagctgccaaatgcaagggactgggtgccaaggttcatacctttgtggtagactgcagcaaccgagaagatatttacagctctgcaaagaaggtgaaggcagaaattggagatgttagtattttagtaaataatgctggtgtagtctatacatcagatttgtttgctacacaagatcctcagattgaaaagacttttgaagttaatgtacttgcacatttctggactacaaaggcatttcttcctgcaatgacgaagaataaccatggccatattgtcactgtggcttcggcagctggacatgtctcggtccccttcttactggcttactgttcaagcaagtttgctgctgttggatttcataaaactttgacagatgaactggctgccttacaaataactggagtcaaaacaacatgtctgtgtcctaatttcgtaaacactggcttcatcaaaaatccaagtacaagtttgggacccactctggaacccgaggaagtggtaaacaggctgatgcatgggattctgactgagcagaagatgatttttattccatcttctatagcttttttaacaacattggaaaggatccttcctgagcgtttcctggcagttttaaaacgaaaaatcagtgttaagtttgatgcagttattggatataaaatgaaagcgcaataagcacctagttttctgaaaactgatttaccaggtttaggttgatgtcatctaatagtgccagaattttaatgtttgaacttctgttttttctaattatccccatttcttcaatatcatttttgaggctttggcagtcttcatttactaccacttgttctttagccaaaagctgattacatatgatataaacagagaaatacctttagaggtgactttaaggaaaatgaagaaaaagaaccaaaatgactttattaaaataatttccaagattatttgtggctcacctgaaggctttgcaaaatttgtaccataaccgtttatttaacatatatttttatttttgattgcacttaaattttgtataatttgtgtttctttttctgttctacataaaatcagaaacttcaagctctctaaataaaatgaaggactatatctagtggtatttcacaatgaatatcatgaactctcaatgggtaggtttcatcctacccattgccactctgtttcctgagagatacctcacattccaatgccaaacatttctgcacagggaagctagaggtggatacacgtgttgcaagtataaaagcatcactgggggatttaaggagaattgagagaatgtacccacaaatggcagcaataataaatggatcacacttaacg

SEQ ID NO: 969 - protein, 300 aa, Homo sapien
MKFLLDILLLLPLLIVCSLESFVKLFIPKRRKSVTGEIVLITGAGHGIGRLTAYEFAKLKSKLVLWDINKHGLEETAAKCKGLGAKVHTFVVDCSNREDIYSSAKKVKAEIGDVSILVNNAGVVYTSDLFATQDPQIEKTFEVNVLAHFWTTKAFLPAMTKNNHGHIVTVASAAGHVSVPFLLAYCSSKFAAVGFHKTLTDELAALQITGVKTTCLCPNFVNTGFIKNPSTSLGPTLEPEEVVNRLMHGILTEQKMIFIPSSIAFLTTLERILPERFLAVLKRKISVKFDAVIGYKMKAQ

SEQ ID NO: 970 - DNA, 1668 bp, Homo sapien
ggcacgagggtgagcgctcgcaagaggacggcagaggcccggcagctcggagctccgggaccttgtggcgcatcaggacgcggctgtccctctgccgggacccagagccgccgccgccgctctgcctcctgcgtgttagcctcctctgcgcgctccgggcaggcggccgtgggagccgctggggcgaggacggcgcgaggctgctgctgctgcccccggcccgcgcggctggaaacggagaggccgagccaagcggcggcccctcttatgctgggaggatgctggagagtagcggctgcaaagcgctgaaggagggcgtgctggagaagcgcagcgacgggttgttgcagctctggaagaaaaagtgttgcatcctcaccgaggaagggctgctgcttatcccgcccaagcagctgcaacaccagcagcagcagcaacagcagcagcagcagcagcaacaacagcccgggcaggggccggccgagccgtcccaacccagtggccccgctgtcgccagcctcgagccgccggtcaagctcaaggaactgcacttctccaacatgaagaccgtggactgtgtggagcgcaagggcaagtacatgtacttcactgtggtgatggcagagggcaaggagatcgactttcggtgcccgcaagaccagggctggaacgccgagatcacgctgcagatggtgcagtacaagaatcgtcaggccatcctggcggtcaaatccacgcggcagaagcagcagcacctggtccagcagcagcccccctcgcagccgcagccgcagccgcagctccagccccaaccccagcctcagcctcagccgcaaccccagccccaatcacaaccccagcctcagccccaacccaagcctcagccccagcagctccacccgtatccgcatccacatccacatccacactctcatcctcactcgcacccacaccctcacccgcacccgcatccgcaccaaataccgcacccacacccacagccgcactcgcagccgcacgggcaccggcttctccgcagcacctccaactctgcctgaaaggggcagctcccgggcaagacaaggttttgaggacttgaggaagtgggacgagcacatttctattgtcttcacttggatcaaaagcaaaacagtctctccgccccgcaccagatcaagtagtttggacatcaccctactgaaaacttgcgattcttcttagttttctgcatacttttcatcacgatgcaggaaacgatttcgagtcaagaagacttttatttatgaacctttgaaaggatcgtcttgtatggtgaattttctaggagcgatgatgtactgtaattttattttaatgtattttgatttatgattatttattagttttttttaaatgcttgttctaagacatttctgaatgtagaccattttccaaaaaggaaactttattttcaaaaacctaatccgtagtaattcctaatcttggagaataaaaaagggcggtggaggggaaaacattaagaatttattcattatttctcgagtactttcagaaagtctgacactttcattgttgtgccagctggttgaaattaaaactctgatattaaaaaaaaaaaaaaaaaaaaaaaaaaaaaaaaaaaaaaaaaaaaaaaaaaaaaaaaaaaaa

SEQ ID NO: 971 - protein, 259 aa, Homo sapien
MLESSGCKALKEGVLEKRSDGLLQLWKKKCCILTEEGLLLIPPKQLQHQQQQQQQQQQQQQQPGQGPAEPSQPSGPAVASLEPPVKLKELHFSNMKTVDCVERKGKYMYFTVVMAEGKEIDFRCPQDQGWNAEITLQMVQYKNRQAILAVKSTRQKQQHLVQQQPPSQPQPQPQLQPQPQPQPQPQPQPQSQPQPQPQPKPQPQQLHPYPHPHPHPHSHPHSHPHPHPHPHPHQIPHPHPQPHSQPHGHRLLRSTSNSA

SEQ ID NO: 972 - DNA, 3227 bp, Homo sapien
cccgtatccgcatccacatccacatccacactctcatcctcactcgcacccacaccctcacccgcacccgcatccgcaccaaataccgcacccacacccacagccgcactcgcagccgcacgggcaccggcttctccgcagcacctccaactctgcctgaaaggggcagctcccgggcaagacaaggttttgaggacttgaggaagtgggacgagcacatttctattgtcttcacttggatcaaaagcaaaacagtctctccgccccgcaccagatcaagtagtttggacatcaccctactgaacaacttggcgattcttcttagttttctgcatacttttcatcaccgatgcaggaaacgatttcgagtcaagaagacttttatttatgaacctttgaaaggatcgtcttgtatggtgaattttctaggagcgatgatgtactgtaattttattttaatgtattttgatttatgattatttattagttttttttaaatgcttgttctaagacatttctgaatgtagaccattttccaaaaaggaaactttattttcaaaaacctaatccgtagtaattcctaatcttggagaataaaaaagggcggtggaggggaaaacattaagaatttattcattatttctcgagtactttcagaaagtctgacactttcattgttgtgccagctggttgaaattaaaactctgatattactttttttgaggatttttatttttgtttttgcttaaacactatagtttgtctagaagtttaaaaagctaaaagttaaaaatggtgtaattatgaaaatctaacactcaagatagtttctaaaaggaaatcagtagttaaggatacctgatttcaaaatatttaaagcataacctaactgatggtaggatgattgtatcttgaatatgtggtagggccacatctattgtaggaaaaccttgcttttatcatctgtgtgtaaagggcttaataaggagaagaggccttttgactgatttgtgagtataaatgcatttgctgtttcatttcaaaaatgttgtggaggaaaagagtacatttaacttgtataagagaatatttgtactcctgtccaggctgcaggacctttcttcgagagctttgcacacttgacttgaaccacattttctgatccctttactttgttttagaagcacactgaaaaatctcgttgtttaaagtacaatttgtaaatatttcaaaggtctaggagtcataacttttgttttcatactgaaaatgatgttgatcagagaaaccaactgttttgcttttcattgctctgtgagaaattgaggattctgttttgctgttaggtaagctaactcagaaattgaaaggaaagactggataaacaccggattttcagtaagaaaacaaccccagtcttgtcttagaagccacttgttgaggagtctgttgggggaaaaaagaggatatgcttttaaaggtagaacaaaccttcttctgtgttaaatcaaaaggatgttcaaaatccaccaggacagatgctacttgggtttaaatggagccatagatgatacaaagtcctcttggggctgaaaatcacttcctatttgcatggctttactaactggtttctgttttccattatctttttcacagaaagtcttggtcagtatttttccagcatttaaattgaaacggtcagtattagaccactgctaggttatgtagtcaagaaataaaaatagaattacatgctacagatgtctttattctccttccatctagaaaggagttccaaggtcaaattactttttagtgcaatagttaaatgacattttgagatcataactcatatccaaaaagttgcagggaaaattaaaatagctttcccctattaagctaatggcaaacaaaacttaagtggacccccacttccagtggttgtttaggttgcagttgtgaaaatatgctgccaacatttaaaaacttgtttcatatgtatatatgtatacacatatatgaatatgtatgtatatatacatatatgagaacatgtgtgtacacatatatgaatatgtatatatgtgtatgtatgtatatatgtatatgaaatgagagccacatctaaagatttcttaaatcaagtttggttcagcttccttagaactgtggctgtactttttgaggagtacctcatagtactatatttttaatgcatgcaaatcataatagctccaaatgaaccacagttttttcccaatggaggatttttttttaattcttgtactaaaaaaaaaaaatccataccaaatatttttacaaattaagattgatgtaggttttaaaaaaggcatttgtatgttgttagcttacatatggggctaggtaatttcattgcttaaaaagatgcgcctaggctccctcttggtggctggatttctttttcttcgcccgtggtggccatggtttttaatagggccaccggaatcatggtttcttttttttttttttttttggagatggagtctcgccctgtgacccaggctggagtgcagtggcacgatctcggctcactgcaacctctgcctcttgggttcacgccattctcctgtgtcagcctcctgagtagctgggactacaggtgaatgccaccacgcccggctgatttttgtatttttagtagagatggggtttcaccatagtggtcaggctgttctcgaactcctgacctcaggtgatccacctgccttggcctcccaaagtgctaggattacaggtgtgagccaccacacccggccccagagtaatggtttcttgactttctgtagcccttgttccttagtctgctgtgatatttatgttgacctttatcattttctattctgaacccctcttagcatttaatgtgaaatctaagaaattagaagtagaatggcttttattgttttgacacctttgaaattattattaataatttttccagagcaaaaaagcaaacacgctcaataagactaaacaaaacaaaatataaatgtacatcatttaatgtcccagtggctctattctacctgtaagaaaatgatacaaaaccacctaagatattttgaagcctgacaaatcagcttcatggaaaaaggtaaaaaatgcatttttcaaccgaaagggcagatccaatagaagacccgctccttaaataaacataaaatgtaaaaagttggaaaaaaaaa

SEQ ID NO: 973 - DNA, 3044 bp, Homo sapien
gtttgcgggtggttgttgctctcggggccgtgtggagtaggtctggacctggactcacggctgcttggagcgtccgccatgaggagaagtgaggtgctggcggaggagtccatagtatgtctgcagaaagccctaaatcaccttcgggaaatatgggagctaattgggattccagaggaccagcggttacaaagaactgaggtggtaaagaagcatatcaaggaactcctggatatgatgattgctgaagaggaaagcctgaaggaaagactcatcaaaagcatatccgtctgtcagaaagagctgaacactctgtgcagcgagttacatgttgagccatttcaggaagaaggagagacgaccatcttgcaactagaaaaagatttgcgcacccaagtggaattgatgcgaaaacagaaaaaggagagaaaacaggaactgaagctacttcaagagcaagatcaagaactgtgcgaaattctttgtatgccccactatgatattgacagtgcctcagtgcccagcttagaagagctgaaccagttcaggcaacatgtgacaactttgagggaaacaaaggcttctaggcgtgaggagtttgtcagtataaagagacagatcatactgtgtatggaagaattagaccacaccccagacacaagctttgaaagagatgtggtgtgtgaagacgaagatgccttttgtttgtctttggagaatattgcaacactacaaaagttgctacggcagctggaaatgcagaaatcacaaaatgaagcagtgtgtgaggggctgcgtactcaaatccgagagctctgggacaggttgcaaatacctgaagaagaaagagaagctgtggccaccattatgtctgggtcaaaggccaaggtccggaaagcgctgcaattagaagtggatcggttggaagaactgaaaatgcaaaacatgaagaaagtgattgaggcaattcgagtggagctggttcagtactgggaccagtgcttttatagccaggagcagagacaagcttttgcccctttctgtgctgaggactacacagaaagtctgctccagctccacgatgctgagattgtgcggttaaaaaactactatgaagttcacaaggaactctttgaaggtgtccagaagtgggaagaaacctggaggcttttcttagagtttgagagaaaagcttcagatccaaatcgatttacaaaccgaggaggaaatcttctaaaagaagaaaaacaacgagccaagctccagaaaatgctgcccaagctggaagaagagttgaaggcacgaattgaattgtgggaacaggaacattcaaaggcatttatggtgaatgggcagaaattcatggagtatgtggcagaacaatgggagatgcatcgattggagaaagagagagccaagcaggaaagacaactgaagaacaaaaaacagacagagacagagatgctgtatggcagcgctcctcgaacacctagcaagcggcgaggactggctcccaatacaccgggcaaagcacgtaagctgaacactaccaccatgtccaatgctacggccaatagtagcattcggcctatctttggagggacagtctaccactcccccgtgtctcgacttcctccttctggcagcaagccagtcgctgcttccacctgttcagggaagaaaacaccccgtactggcaggcatggagccaacaaggagaacctggagctcaacggcagcatcctgagtggtgggtaccctggctcggcccccctccagcgcaacttcagcattaattctgttgccagcacctattctgagtttgcgaaggatccgtccctctctgacagttccactgttgggcttcagcgagaactttcaaaggcttccaaatctgatgctacttctggaatcctcaattcaaccaacatccagtcctgagaagccctgatcagtcaaccagctgtggcttcctgtgcctagactggacctaattatatgggggtgactttagtttttcttcagcttaggagtgcttgaaaccttggccaggttccatgaccatgggcctaacttaaagatgtgaatgagtgttacagttgaaagcccatcataggtttagtggtcctaggagacttggttttgacttatatacatgaaaagtttatggcaagaagtgcaaattttagcatatggggcctgacttctctaccacataattctacttgctgaagcatgatcaaagcttgttttatttcaccactgtaggaaaatgattgactatgcccatccctgggggtaattttggcatgtatacctgtaactagtaattaacatcttttttgtttaggcatgttcaattaatgctgtagctatcatagctttgctcttacctgaagccttgtccccaccacacaggacagccttcctcctgaagagaatgtctttgtgtgtccgaagttgagatggcctgccctactggcaaagaggtgacaggaaggctgggagcagctttgttaaattgtgttcagttctgttacacagtgcattgccctttgttgggggtatgcatgtatgaacacacatgcttgtcggaacgctttctcggcgtttgtcccttggctctcatctcccccattcctgtgcctactttgcctgagttcttctacccccgcagttgccagccagattgggagtctgtttgttccaatgggttgagctgtctttgtcgtggagatctggaactttgcacatgtcactactggggaggtgttcctgctctagcttccacgatgaggcgccctctttacctatcctctcaatcactactcttcttgaagcactattatttattcttccgctgtctgcctgcagcagtactactgtcaacatagtgtaaatggttctcaaaagcttaccagtgtggacttggtgttagccacgctgtttacctcatacagtacgtgtcctgtttttaaaatatacaattattcttaaaaataaattaaaatcgtatacttacatttcaaaaaaaaaaaaaaaaa

SEQ ID NO: 974 - protein, 620 aa, Homo sapien
MRRSEVLAEESIVCLQKALNHLREIWELIGIPEDQRLQRTEVVKKHIKELLDMMIAEEESLKERLIKSISVCQKELNTLCSELHVEPFQEEGETTILQLEKDLRTQVELMRKQKKERKQELKLLQEQDQELCEILCMPHYDIDSASVPSLEELNQFRQHVTTLRETKASRREEFVSIKRQIILCMEELDHTPDTSFERDVVCEDEDAFCLSLENIATLQKLLRQLEMQKSQNEAVCEGLRTQIRELWDRLQIPEEEREAVATIMSGSKAKVRKALQLEVDRLEELKMQNMKKVIEAIRVELVQYWDQCFYSQEQRQAFAPFCAEDYTESLLQLHDAEIVRLKNYYEVHKELFEGVQKWEETWRLFLEFERKASDPNRFTNRGGNLLKEEKQRAKLQKMLPKLEEELKARIELWEQEHSKAFMVNGQKFMEYVAEQWEMHRLEKERAKQERQLKNKKQTETEMLYGSAPRTPSKRRGLAPNTPGKARKLNTTTMSNATANSSIRPIFGGTVYHSPVSRLPPSGSKPVAASTCSGKKTPRTGRHGANKENLELNGSILSGGYPGSAPLQRNFSINSVASTYSEFAKDPSLSDSSTVGLQRELSKASKSDATSGILNSTNIQS

SEQ ID NO: 975 - DNA, 704 bp, Homo sapien
gcggatcatccgcttccggagtcgaggttttcgggcttgtaccgcttggcggtgcggcctggtgtcggcttgcaggttctttctgtgtttgttctctgccctgccaaggccgtagagctggtgcgtgcgggtagcggggctctccgaggagcgcggcacgccgcgcaccatggtccacctcactactctcctctgcaaggcctaccgtgggggccacttaaccatccgccttgccctgggtggctgcaccaatcggccgttctaccgcattgtggctgctcacaacaagtgtcccagggatggccgtttcgtagagcagctgggctcctatgatccattgcccaacagtcatggagaaaaactcgttgccctcaacctagacaggatccgtcattggattggctgcggggcccacctctctaagcctatggaaaagcttctgggtcttgctggctttttccctctgcatcctatgatgatcacaaatgctgagagactgcgaaggaaacgggcacgtgaagtcctgttagcttctcagaaaacagatgcagaagctacagatacagaggctacagaaacataaatgagctgactttagtgagcatagcagtgggaacaaggtcaaggtccttttgaaacactgcagcgatcttaattttgttagatttggagttcaataaatggagtatcctgaaaaaaaaaaa

SEQ ID NO: 976 - protein, 137 aa, Homo sapien
MVHLTTLLCKAYRGGHLTIRLALGGCTNRPFYRIVAAHNKCPRDGRFVEQLGSYDPLPNSHGEKLVALNLDRIRHWIGCGAHLSKPMEKLLGLAGFFPLHPMMITNAERLRRKRAREVLLASQKTDAEATDTEATET

SEQ ID NO: 977 - DNA, 1143 bp, Homo sapien
ggagctctggaggcggggcttcgagcgtggctcgtgggttttccgtgaagtcgcggtgcagcggtgggcggcatgtctgtggccggtggggagattcgtggggacacggggggagaggacactgctgctcccggccggttcagcttcagcccggagcccacgctcgaggacatccgccgcctccatgctgagtttgctgcggaacgagactgggaacagttccatcagcctcggaatctcctcctggccttggttggggaagtgggggagctggcagaactctttcagtggaaaaccgatggggaacctggcccccaaggctggtcccccagggaacgggcagcccttcaagaggagcttagtgacgtcctcatctacctggtggcattagcagcccgctgccgtgtggatctgccgctagcagtgctctccaaaatggacatcaaccggcgacgctacccagcccatctggcccgcagctcttcccgcaagtatacagaattgccccatggggccatctctgaagaccaggctgtggggcctgcggacattccctgtgactccacaggccagacctcaacctagaaagatggccacaggacttgcaactcagggtggtgtctgaagagcagagagtggcctggccctggagcctttttctagtcttttcagaatagatcatgggcctgaggcctccacttcttgaggtctgaggcccagcagcctctagaaggtagcctcctggtgtttgttctcccagtaaaatggttttgggcgataacttctagattattcctggatggccagggaggctctctgtctcagcaggtgatgacgggggtaccaggggtgcctctgagacccattctcgtgtttccctgttgtaccttttgcctgcagggcagagagatctggtttctagcaaattcccagtaggatgtcatgtaagttccttccccctcttagagattgaaggctgtaagagtccagatggtggagccaggctgtctgggttcaaatgccatctttgacacttgcaagctaaatgacattactcaaattaatcgttctgcacttcagcttccttgtctatcaaataaaaagaatagtacctgcccaaaaaaaaaaaaaaaaaaaaaaaaa

SEQ ID NO: 978 - protein, 170 aa, Homo sapien
MSVAGGEIRGDTGGEDTAAPGRFSFSPEPTLEDIRRLHAEFAAERDWEQFHQPRNLLLALVGEVGELAELFQWKTDGEPGPQGWSPRERAALQEELSDVLIYLVALAARCRVDLPLAVLSKMDINRRRYPAHLARSSSRKYTELPHGAISEDQAVGPADIPCDSTGQTST

SEQ ID NO: 979 - DNA, 841 bp, Homo sapien
  Unsure 47: Unknown base
  Unsure 49: Unknown base
gaaggtcagcgtgtgaagtaggcgctggcaacgcggggttaccctgntntattgaggagtaacggcccagcggaccacccaggcttgaggcagcggcgggaaccactcggtttgctgcgataccatggaaggaggcgggggaagcggcaacaaaaccacagggggattggccggctttttcggagccggcggagcaggttactcgcacgcggatttggctggcgtcccgctaactggtatgaaccctctgtctccttatttaaatgtggatccacgatacctcgtgcaggatacagatgagtttattttacctaccggagctaataaaacccggggcagatttgagctggccttctttacgattggaggatgttgcatgacaggggctgcgtttggtgcaatgaatggtcttcggctaggattgaaggaaacccagaacatggcctggtccaaaccaagaaatgtacagattttgaatatggtgactaggcaaggggcactttgggctaatactctaggttctctggctttgctctatagtgcatttggtgtcatcattgagaaaacacgaggtgcagaagatgaccttaacacagtagcagctggaaccatgacaggcatgttgtataaatgtacaggtggtcttcgagggatagcacgaggtggtctgacaggactaacacttaccagcctctatgcactatataataactgggagcacatgaaaggctccttgctccaacagtcactctgaagattttgccaactcatgaatggaggacacttcagtagttcatctaggatccttttattaaggacagtttgggagttatttctctct

SEQ ID NO: 980 - protein, 209 aa, Homo sapien
MEGGGGSGNKTTGGLAGFFGAGGAGYSHADLAGVPLTGMNPLSPYLNVDPRYLVQDTDEFILPTGANKTRGRFELAFFTIGGCCMTGAAFGAMNGLRLGLKETQNMAWSKPRNVQILNMVTRQGALWANTLGSLALLYSAFGVIIEKTRGAEDDLNTVAAGTMTGMLYKCTGGLRGIARGGLTGLTLTSLYALYNNWEHMKGSLLQQSL

SEQ ID NO: 981 - DNA, 1668 bp, Homo sapien
ggcgaaggagatcagcaggacgctgcgcacaacatgggcaaccacctgccgctcctgcctgcagagagtgaggaagaagatgaaatggaagttgaagaccaggatagtaaagaagccaaaaaaccaaacatcataaattttgacaccagtctgccgacatcacatacatacctaggtgctgatatggaagaatttcatggcaggactttgcacgatgacgacagctgtcaggtgattccagttcttccacaagtgatgatgatcctgattcccggacagacattacctcttcagctttttcaccctcaagaagtcagtatggtgcggaatttaattcagaaagatagaacctttgctgttcttgcatacagcaatgtacaggaaagggaagcacagtttggaacaacagcagagatatatgcctatcgagaagaacaggattttggaattgagatagtgaaagtgaaagcaattggaagacaaaggttcaaagtccttgagctaagaacacagtcagatggaatccagcaagctaaagtgcaaattcttcccgaatgtgtgttgccttcaaccatgtctgcagttcaattagaatccctcaataagtgccagatatttccttcaaaacctgtctcaagagaagaccaatgttcatataaatggtggcagaaataccagaagagaaagtttcattgtgcaaatctaacttcatggcctcgctggctgtattccttatatgatgctgagaccttaatggacagaatcaagaaacagctacgtgaatgggatgaaaatctaaaagatgattctcttccttcaaatccaatagatttttcttacagagtagctgcttgtcttcctattgatgatgtattgagaattcagctccttaaaattggcagtgctatccagcgacttcgctgtgaattagacattatgaataaatgtacttccctttgctgtaaacaatgtcaagaaacagaaataacaaccaaaaatgaaatattcagtttatccttatgtgggccgatggagcttatgtgaatcctcatggatatgtgcatgagacacttactgtgtataaggcttgcaacttgaatctgataggccggccttctacagaacacagctggtttcctgggtatgcctggactgttgcccagtgtaagatctgtgcaagcccatattggatgggaagtttacggccaccaaaaaagacatgtcacctcaaaaattttggggcttaacgcgatctgctctgttgcccacgatcccagacactgaagatgaaataagtccagacaaagtaatactttgcttgtaaacagatgtgatagagataaagttatctaacaaattggttatattctaagatctgctttggaaattattgcctctgatacatacctaagtaaacataacattaatacctaagtaaacataacattacttggagggttgcagtttctaagtgaaactgtatttgaaacttttaagtatactttaggaaacaagcatgaacggcagtctagaataccagaaacatctacttgggtagcttggtgccattatcctgtggaatctgatatgtctggtagcatgtcattgatgggacatgaagacatctttggaaatgatgagattatttcctgtgttaaaaaaaaaaaa

SEQ ID NO: 982 - protein, 336 aa, Homo sapien
MGNHLPLLPAESEEEDEMEVEDQDSKEAKKPNIINFDTSLPTSHTYLGADMEEFHGRTLHDDDSCQVIPVLPQVMMILIPGQTLPLQLFHPQEVSMVRNLIQKDRTFAVLAYSNVQEREAQFGTTAEIYAYREEQDFGIEIVKVKAIGRQRFKVLELRTQSDGIQQAKVQILPECVLPSTMSAVQLESLNKCQIFPSKPVSREDQCSYKWWQKYQKRKFHCANLTSWPRWLYSLYDAETLMDRIKKQLREWDENLKDDSLPSNPIDFSYRVAACLPIDDVLRIQLLKIGSAIQRLRCELDIMNKCTSLCCKQCQETEITTKNEIFSLSLCGPMELM

SEQ ID NO: 983 - DNA, 2414 bp, Homo sapien
cccgcgtgcatacggttgccggcatggcacattacaacttcaagaaaattacggtggtgccgtccgccaaggacttcatagacctcacgttgtcgaagactcaacgaaagactccaaccgttattcataaacattaccaaatacatcgcattagacatttttacatgagaaaagtcaaatttactcaacagaattaccatgatagactttcacaaattctaacagatttccccaaattggatgatattcatccgttctatgctgatttgatgaatattctctacgacaaggatcattacaagttggctctggggcaaataaatattgccaaaaatttagtggacaatgttgctaaagattatgtgcgactgatgaagtatggcgactctctctaccgctgcaaacagctgaagcgtgcggccctgggacggatgtgcacagtgatcaagaggcagaagcagagtttggagtatttggagcaagtgcgtcagcatttatcccgtttgccaaccattgatccgaataccaggaccctgcttttgtgtgggtacccaaatgttgggaagtccagcttcatcaacaaggtgacgagagcagacgtggatgtccagccctatgcgttcacaaccaagtctctgtttgttgggcacatggattataagtatctacgttggcaggttgtagacactcctgggatcctggaccaccctctggaggataggaacaccatcgagatgcaggccatcactgccctggcccacctccgtgctgcggtcctgtatgtgatggatttgtctgagcagtgtgggcatgggctgagggagcagctagaactcttccagaacatcagacctctcttcatcaacaagcctctcatagttgtagccaacaaatgtgatgtgaagagaatagctgaactttctgaagatgatcagaaaatatttacagatttgcagtctgaaggattccctgtaatagagaccagcaccctgactgaggaaggtgttattaaagttaaaacagaggcttgcgataggcttttggctcatcgagtggaaaccaaaatgaagggaaataaagtgaatgaggtgctgaatagactgcacctggctatcccaaccaggagggacgataaggagaggccccctttcatccctgaaggagtggtggctcgcaggaagaggatggaaactgaggagtccaggaagaagagggaacgagatcttgagctggaaatgggagatgattatattttggatcttcagaagtactgggatttaatgaatttgtctgaaaaacatgataagataccagaaatctgggaaggccataatatagctgattatattgatccagccatcatgaagaaattggaagaattagaaaaagaagaagagctgagaacagctgctggagagtatgacagtgtatctgagagtgaagacgaagagatgctggaaatccgacagctggcaaagcaaattcgagagaaaaagaagttgaaaattctggagtccaaagaaaagaatacacagggacccaggatgccgcgaactgctaagaaggttcagaggacagttttggagaaggagatgcgtagtcttggtgttgacatggacgataaagacgatgcccattacgcagtccaggcaagaagatcccggagcatcactaggaaaagaaagcgggaagactctgctcccccgtcctctgtggcccggagtgggagttgctctcgaactccacgtgacgtttctggtcttagggatgtcaagatggtgaagaaagccaagactatgaagaatgctcagaagaagatgaatcggttggggaagaaaggggaggcggatagacacgtgtttgatatgaagcccaagcacttgctgtctgggaagaggaaagctggtaaaaaggacaggagatagtatccgtttggttggcgtggcttcgctagagtgttgctgtttatttcctggtttggtacagtatggtttcatgaaattggagctctgtacaaactgaaaaagacaaaataagtaaagcacttgttgctttgctgaaaactatggttaaccctatataggtgtgggaaatttttgtcactgcataatattacaaatattttgagtagacagtgtttccacatttaatggagtatcagttgcttcagattttcagaactgggaagatttactggtgtaactgggttgtttttgatggagaaaaaccttattttcttttgtaagagctgggagcaaacacgtttatgagtgtgtcggaatcccgtgcttaaaatacgctcttaaattattttctagtcttattttacaatgtctcattgtagtctgtcttcaactattttatccaaaataaacctccagaagaaactaaaaaaaaaaaaaaaaaaaaaaaaa

SEQ ID NO: 984 - protein, 633 aa, Homo sapien
MAHYNFKKITVVPSAKDFIDLTLSKTQRKTPTVIHKHYQIHRIRHFYMRKVKFTQQNYHDRLSQILTDFPKLDDIHPFYADLMNILYDKDHYKLALGQINIAKNLVDNVAKDYVRLMKYGDSLYRCKQLKRAALGRMCTVIKRQKQSLEYLEQVRQHLSRLPTIDPNTRTLLLCGYPNVGKSSFINKVTRADVDVQPYAFTTKSLFVGHMDYKYLRWQVVDTPGILDHPLEDRNTIEMQAITALAHLRAAVLYVMDLSEQCGHGLREQLELFQNIRPLFINKPLIVVANKCDVKRIAELSEDDQKIFTDLQSEGFPVIETSTLTEEGVIKVKTEACDRLLAHRVETKMKGNKVNEVLNRLHLAIPTRRDDKERPPFIPEGVVARRKRMETEESRKKRERDLELEMGDDYILDLQKYWDLMNLSEKHDKIPEIWEGHNIADYIDPAIMKKLEELEKEEELRTAAGEYDSVSESEDEEMLEIRQLAKQIREKKKLKILESKEKNTQGPRMPRTAKKVQRTVLEKEMRSLGVDMDDKDDAHYAVQARRSRSITRKRKREDSAPPSSVARSGSCSRTPRDVSGLRDVKMVKKAKTMKNAQKKMNRLGKKGEADRHVFDMKPKHLLSGKRKAGKKDRR

SEQ ID NO: 985 - DNA, 1280 bp, Homo sapien
ggctgcgagaagacgacagaagggggaaggggctgatgcgaactggggccacggtagccatcgcgctttgcagttcggtctcctggtgtacggccaacgccaagtaggggattgcgttccctccagtcgcagaccctatcagatttggatatgtccttcatatttgattggatttacagtggtttcagcagtgtgctacagtttttaggattatataagaaaactggtaaactggtatttcttggattggataatgcaggaaaaacaacattgctacacatgctaaaagatgacagacttggacaacatgtcccaacattacatcccacttccgaagaactgaccattgctggcatgacgtttacaacttttgatctgggtggacatgttcaagctcgaagagtgtggaaaaactaccttcctgctatcaatggcattgtatttctggtggattgtgcagaccacgaaaggctgttagagtcaaaagaagaacttgattcactaatgacagatgaaaccattgctaatgtgcctatactgattcttgggaataagatcgacagacctgaagccatcagtgaagagaggttgcgagagatgtttggtttatatggtcagacaacaggaaaggggagtatatctctgaaagaactgaatgcccgacccttagaagttttcatgtgtagtgtgctcaaaagacaaggttacggagaaggcttccgctggatggcacagtacattgattaacacaaactcacattggttccaggtctcaacgttcaggcttactcagagatttgattgctcaacatgcataacttgaattcaatagacttttgctggttataaaacagatgttttttagattattaatattaaatcaacttaatttgaatgagaattgaaaactgattcaagtaagtttgagtatcacaatgttagctttctaattccataaaagtacttggtttttacagtttataatctgacatcaccccagcgccatttgtaaagagcaactttccagcagtacatttgaagcactttttaacaacatgaaactataaaccatatttaaaagctcatcatgttaaattttttatgtacttttctggaactagtttttaaattttagattatatgtccacctatcttaagtgtacagttaataattagcttattcaatgattgcatgatgccttacagttttcaataactttttttcttatgcaaacgtcatgcaataaaacaaactctaatgtttggcaaaaaaaaaaaaa

SEQ ID NO: 986 - protein, 198 aa, Homo sapien
MSFIFDWIYSGFSSVLQFLGLYKKTGKLVFLGLDNAGKTTLLHMLKDDRLGQHVPTLHPTSEELTIAGMTFTTFDLGGHVQARRVWKNYLPAINGIVFLVDCADHERLLESKEELDSLMTDETIANVPILILGNKIDRPEAISEERLREMFGLYGQTTGKGSISLKELNARPLEVFMCSVLKRQGYGEGFRWMAQYID

SEQ ID NO: 987 - DNA, 4341 bp, Rattus norvegicus
ccggcccggcccgcccggcccagccgctcctgctgggcgccccaaccgggtccggcccgggggggcgggggccgcggccgccgaggatggggaaatccaacagcaagttgaagcccgaagttgtggaggagctgaccaggaagacctactttaccgagaaggaggtccagcagtggtacaaaggcttcatcaaggactgccccagtgggcagctggatgcggcaggcttccagaagatctacaagcaattcttcccgttcggagaccccaccaagtttgccacatttgttttcaacgtctttgatgaaaacaaggacgggcgaattgagttctccgagttcatccaggcgctgtcggtgacctcacggggaaccctggatgagaagctacggtgggccttcaagctctacgacttggacaatgatggctacatcaccaggaatgagatgctggacattgtggatgccatttaccagatggtggggaataccgtggagctcccagaggaggagaacactcctgagaagagggtggaccggatctttgccatgatggataagaatgccgacgggaagctgaccctgcaggagttccaggaggggtccaaggcagacccgtccattgtgcaggcgctgtccctctacgacgggctggtatagtcccaggctggagctggatgcctgggaaccactcacctccttctgtgccatgaggccacctcagccctgacaccaaccccgtgcgtccacccagccttcttccgcatccacacacagccggctgcccttgacccgggaggccccggctctcctctcccctgtcctgcacccatcccccgcctgaagccaccggctccaattgccagcaacctctgcttgtccggaaaacgacaacacgaaatggaaaaggctacagccctctgcataaaccaaggacttggctgcctcgcaggcagcctccgttcctcccgctctcttgcgcgtgtgcttttgttttttattttgaacagacgttttaaaagaaaaaaaaacaactaccttctgtcctagaagacacagactgacagatggggtgaaggcctggggacctcagagaactctgccttgccctcgtccctcgtccttcggcagccggagaggctgtgggtgggccgagggtgtctaggggttctgcctagtcaacgttatttgtcgtcccatcttttggcagcaaaaccacctgcgtggctaggatgattaattatgaggatgatgattttttttgtgataacagtattgtgctttttgtggggaaagtgaggttttttttttatatacatatataattgatatctttaatttattggttgttaactgttgctgctgcctggtgtgtcctcagctcccagggctgcgggcccaccgtttacatgtgcacgccctgacccacctgcccacgccgacttgggaggatggtggcctgcagcggccaagaagccaaaaaaaattttttttttttcagatactgtgcttgatttttggagaggggagaggtggaaattcctaaatggctaatgcactgttccctccagcccgaatgcctcctgccaaaccccttttccctgctgcctctgtccccgcatccttgttctcccctgggtccgtaacattttttccgaggatgaacaggggacatctttaggtttctcaactcttgctttggtgtttgccgcagcatggaaaacagggcgcctaaggctgggagctggaagaaggggcattgggtacccaggcagagtcaggagaggtggtctttgaagtaagttagcagaaatcaaggggacccccgcctccttgggctggggaggggatttcaagatagttcataactctctcccgctctgccttccctccttcctatctgctttttccagtaaactgcatggtgtccttccctggccttctcttggctcaaaggctgggagggagggaaggagagaagagttccaggcaatcccatcaatatagtccctacacctggggctgcggcccacatgtcttcacggaggcttccagcggtgcctgccactgaggcaggtgcggccccaggaccatcaccaggaatgcgaggccaccctggaccagaggtaggagcccaaggtccggcccttgctctttgattgtgggcagcctcctgccctctctgggtctcagttgccccatctgcagagcgaggaggcccgggctggttggtcttgaaggcccttttccatgccgacatcatgtcactctaggcctggggttcagtttcctgtggctggtgatgctgtggttaagtttgcttgaccccagcagcccgagggactgtctgagtcacagcacagcccctattgcgtggctgctggtgtgtggggtcagttccagcagatgaatgtgtcatgtggcacaccttgtcccttcccgcagcatttcctggttccccccagacccttgagcgctctttgggacccagaaggagtccttgcacagggaaggcttgaggtgagaagccgcttcccagactgtcagggccaggcctgggtctagaattcttgctgctgctttgcagagtcaacagcccatcagcccatgttttagaggggacactttggtcctcggttcccaccctcagcaagcaggcctccagcccgaggaaggcctctgccgtagtgacgttgccgtgtggggctgcgtggctgttccccttggctggagcattcagccaaccccagcgtcccccctgaggcgttcattggcagccccctaggactgcacgctggccccacggtaaccccccctcccccaccaacatcctgcagggatggggtcagtggttccaccttcacaggccactttgaagggtggattctttgaggcccctgccagtcggctccctgctcagctgctggcccgggcgacctgggactcagcaccaacggctgaagtttctcagctgggctctgacctggggtctggggcagggaacgaacatggtggctttgggctgagaggatgagggaggtctttcccaggtcaaattactttcctttggcctctgcctgaggctcgatttgcctctctggtccaatgggactgacactgttgtacaacctgacctgtggctgagggtgtctgggcttaagcatgtggaccccttcggtgtgtctggccttcctccatcgtcctgccctttggccttttggtttgaagccacaggtgtggcttctggccttagcagatggtatgcttgcggaccgcagcccagcatgccggtgggcccacagcccgagccagcccagagctgccggaagggccgcccttcccggccctggcggggtgctggacactggccattttcactagagtttgcctggcagggaccgatctctgccccctcctctccccaggcctctggctgcagtgatgccgcagaatcctgagccaggtgcctcctgagcagcccgtgcgcctctccacagcggcgtttgccacccaatgcggctcgcttcagatgctctgatgcagagggcacgcccatagtccctctgcagagcctcgcactggggccagggcaggcaccagccccaggcggccagtcggccacggcctgtcctcttcctcgtagcgtctgctcctcactttgtgttgatggtgacttaggagaatgttccgattttccatgatctaagcaggccacgtttaaaataacatcaaggcaagcgtacgtgtcaccctctgtactgacatctcctcccctgaaatgcttttcagtttgacagcccgtttcctagacaagtgcacctggggtttcaggaactttgtgttttttcggagggggttggtggggaggtcgggatgcctgggatcccttcctggagaggcaggctgtctctggaaaaagcctccattgcccacccgccaggcggaaagtcaccctgttcccagcgcggtttcagcatttaattttaagggagctaaggaagcgcggcgcgccccctggtggtggtaagccgccaacgcacctgggggctgcaaccccaccggacgggtggtccggagggaggctggagcggggaggcgaggagggggctgtgagtcctcagaggccctgggccaccacatttctggcagcgtttcccagacacccctctgctaggccatccctggatagcaagtgaattaacttaagggcactgtgatgggaagccttgcccccctctttttttttttttttttaatatctgcggaataaacccaatggttaatttttgaatgaataaaaggcttttgttgaataaaaaaaaaaaaaaaaaaaaaaaaaaaa

SEQ ID NO: 988 - protein, 190 aa, Rattus norvegicus [sequence omitted]

SEQ ID NO: 989 - DNA, 2594 bp, Homo sapien
agagctcgcggtggactccgacccggcgcaacatggccgcagcctcgcctctgcgcgactgccaggcctggaaggatgcgaggctcccgctctccaccacaagcaacgaagcctgcaagctgttcgatgccacgctgacccagtatgtaaaatggaccaatgacaagagtctcggtggcatcgagggctgcctgtcaaagctcaaagcagcagatccaacctttgtgatgggccacgccatggctactggccttgtgctgattggcactggaagctccgtgaagctggacaaagagctggacctggctgtgaagacaatggtggagatttcaagaacccagccgctgacaaggcgggagcagctgcacgtgtctgcagtagagacatttgccaatgggaactttccgaaagcctgtgaactatgggaacagattctccaggaccacccgacagacatgttggccctgaaattttcccatgatgcttatttttacctgggctatcaggaacagatgagagattctgttgctcgaatttaccccttctggacacctgacatccccctaagcagctatgtgaaaggcatctactcttttggcttgatggaaaccaacttctacgaccaggcagaaaaactcgccaaagaggctttatctattaacccgacagacgcatggtcggtgcacaccgtcgctcacatccacgagatgaaagcagagatcaaggatgggttggaattcatgcagcactcagagaccctctggaaggactctgatatgttggcttgtcataactattggcactgggctttatatctgattgagaagggcgaatatgaggccgcgctgaccatctacgatacccacatccttcccagcctgcaggccaacgatgcaatgctggacgtggtggacagctgctccatgctctaccgcctgcagatggaaggagtgtctgtgggccacggtggcaggatgtcctgcctgtggcccggaagcacagccgagaccacatcctgctgttcaatgacgcacacttcctgatggcatccctgggtgcacacgacccccagaccacacaggagctgctgaccaccctgcgggacgccagcgaatccccaggggagaactgccagcacctcctggcccgagacgtggggctgcccctgtgccaggccctggtggaggctgaggacgggaaccctgaccgcgtcctggagctgctcctgcccatccgctaccggatcgtccagctcggtgggagcaatgcccagagagacgtcttcaaccagctgctgattcacgcggccttaaactgcacctccagcgtccataagaacgtagcccggagccttctgatggagcgtgatgccttgaagcccaactcgcccctgaccgagcggctcatccgcaaggcagctaccgtccacctcatgcagtgagccagcctggccgctccaccctgcagaacctcagtggtggcgtcactgcgtccagtcagctgctccaccgggttagggtcaggagacggccagagcctgtttgttagggctgttagagggtgatcttcagttttacaggaagtgggtcacgggttaattttaaatgtgattccgaatctcctttcagtcctcgagaagggccaatgagcatttttcagcagtcacagccagtgtgagtgctgctctttccacctgccttgcaaattctgtttcccaggggaatgtgtctactgcctggtggttcaaaggttggaaggcagtgcagaggtgggggctgattctgctgggacaggtcttccagaggcagcctccccccactgcctgtccccgtccccaccaggctgcccttgggatggaccttttcattcttttctttatattctagacagtctctgttgtctcattgtgttgctgtcccatttttcaggtgagggtaccggggtaggggagtggcctgcccagggtcacactatgagaggcccccacctgctgcctttggacgcagccccctgctgctgcatccaccacccttcttacagatcagcgcgcacatggggtccttctgctgtctctggggcgagtcttggagccccctggggggctctgttggtgctgatttggacccgtttctctttttaaactgcacatcataacagggcttcatgtcgagcatgattttaatcataaatgcacttctgaggtgcaaggattgagctcagagctgctctgttgtggcaaaacccaaagtgctgtgatgtgtggctgtgacaagcctggagcgggtcctgtgagcgccgcctctgtctcctgcttcctcactgaacgcctgctgaatgtgccgctgactcagctgtgctgctttcagccctcctgtgaggggcggtcccagtgcacagatgtttttcaagttcctcagtttgtactgaaattagggattcatcagggcaggaagcaggcaggcctctcagaagggagaggaggcctccaaatctattgagtccccacagtttgctcaagcccaggcaaatttctgtgattaaaatgaattcatcagttcctccaaaaaaaaaaaaaaaaaaaaaaaaaaaaaaaa

SEQ ID NO: 990 - protein, 336 aa, Homo sapien
MAAASPLRDCQAWKDARLPLSTTSNEACKLFDATLTQYVKWTNDKSLGGIEGCLSKLKAADPTFVMGHAMATGLVLIGTGSSVKLDKELDLAVKTMVEISRTQPLTRREQLHVSAVETFANGNFPKACELWEQILQDHPTDMLALKFSHDAYFYLGYQEQMRDSVARIYPFWTPDIPLSSYVKGIYSFGLMETNFYDQAEKLAKEALSINPTDAWSVHTVAHIHEMKAEIKDGLEFMQHSETLWKDSDMLACHNYWHWALYLIEKGEYEAALTIYDTHILPSLQANDAMLDVVDSCSMLYRLQMEGVSVGHGGRMSCLWPGSTAETTSCCSMTHTS

SEQ ID NO: 991 - DNA, 2881 bp, Homo sapien
cggacgcgtgggcgaggtggcaattggggaaggggttctgggctgccgcaggcacacaggccagagcttcgtggatacctgcagggcccaaaggtccctccctgttttgaagagtgagtgatggctatgaggtagcggccaggctgatcacccctgcgttggctggaggcagaattctgtaaatcctcgccaagtctttctccaggccactggttagctcatctcagcctcctctgggagcatcaacaccaacatggcacaggggactgcagtggtgtgctttggacctgtgtacccacccaaggctaaaggcagagccagatggagaaggaaaggcaagtgacttgtccagagccactctgtcaaaaggggacttgagtcctcagggctgttgactccaaagctgacaagcaggagccaagttacaccctgtttaaccctgccttcaaagggacgactctgtaagattctctgctacttattcaagttgacacgatgcccttcacactccacctgaggtcccgccttccctctgccataaggagtttgattctacaaaagaaaccaaacatcagaaatacatccagcatggctggagagctccgaccagccagcctggtggtcctgcccaggtcccttgctccagcttttgaaagattctgccaggtcaacactggtcctctacccctgctgggccagagtgagccagaaaagtggatgctgccccctcaaggtgctatctcagagaccaggatgggccatccccagttctggaaatacgagttcggtgcctgcaccggtagcctggcttcgctggagcagtactcggagcagctgaaggacatggtggccttcttcctgggctgcagcttctccctggaggaggccttggagaaagcggggctccccagaagagacccagcaggtcacagccagacaacagtgccttgtgttacccatgctggcttctgctgccctctggtggtcacgatgaggcccattcccaaggacaagctggaagggctggtgcgggcctgctgctccctcggaggtgagcaggggcaacctgttcacatgggcgacccagaactgttgggaatcaaagagctttccaaacctgcctacggggatgccatggtgtgtcccccaggggaggttccagtgttctggccttctccgctgaccagtctcggagctgtcagcagctgtgagaccccactggcttttgccagcatcccaggctgcacagttatgactgacctgaaggatgcaaaggctccacctggttgtctcaccccagagagaattccagaggtccatcacatttcccaagatcctctgcactacagcatcgcgtcagtctctgcttctcagaagatcagagaactagagtctatgatcggcatagacccagggaaccgggggattgggcacctgctctgtaaagatgagctgctgaaggcctctctctcgctgtcccatgcccgctcagtgctcatcaccactgggttccccacacatttcaatcatgagcctccagaagagacagatggcccaccaggagctgttgctctggttgccttcctgcaggccttggagaaggaggtcgccataatcgttgaccagagagcctggaacttgcaccagaagattgttgaagatgctgttgagcaaggtgttctgaagacgcagatcccgatattaacttaccaaggtggatcagtggaagctgctcaggcattcctgtgcaaaaatggggacccgcagacacctagatttgaccacctggtggccatagagcgtgccggaagagctgctgatggcaattactacaatgcaaggaagatgaacatcaagcacttggttgaccccattgacgatctttttcttgctgcgaagaagattcctggaatctcatcaactggagtcggtgatggaggcaacgagcttgggatgggtaaagtcaaggaggctgtgaggaggcacatacggcacggggatgtcatcgcctgcgacgtggaggctgactttgccgtcattgctggtgtttctaactggggaggctatgccctggcctgcgcactctacatcctgtactcatgtgctgtccacagtcagtacctgaggaaagcagtcggaccctccagggcacctggagatcaggcctggactcaggccctcccgtcggtcattaaggaagaaaaaatgctgggcatcttggtgcagcacaaagtccggagtggcgtctcgggcatcgtgggcatggaggtggatgggctgcccttccacaacacccacgccgagatgatccagaagctggtggacgtcaccacggcacaggtgtaaccgtccatgttccgtgtgagcagagtccctaccaacgggcaggtctgcatccggggagaatgcagctgcttctggcgacaatcctgctagtaaacactggtcttcggtgagcaacgaacactcgcctggcctgggaaactgcatgcccactttctgggaggggttagtgcaggtgccgtggacaaaggacaacatttctctggggctttttaacttttattcctaagactctaaaggcgttgatttcaaccctccttcactctggcttcttcaggcaacccacgtggtctcctgtgagaatcttctcgacagttacttatggggacacttgtgaacaattaactgccaggcagagcatgagaacaaacattcccaggccatgtaggataggatactccagactccagtcatcctcccccatccatggtttctgttactcatggtttcagttactcatagccaactgcagaccgaaaatactaaatgaaaaatttcagaaataaacaactcttaagttttaaaaaaaaaaaaaaaa

SEQ ID NO: 992 - protein, 616 aa, Homo sapien
MPFTLHLRSRLPSAIRSLILQKKPNIRNTSSMAGELRPASLVVLPRSLAPAFERFCQVNTGPLPLLGQSEPEKWMLPPQGAISETRMGHPQFWKYEFGACTGSLASLEQYSEQLKDMVAFFLGCSFSLEEALEKAGLPRRDPAGHSQTTVPCVTHAGFCCPLVVTMRPIPKDKLEGLVRACCSLGGEQGQPVHMGDPELLGIKELSKPAYGDAMVCPPGEVPVFWPSPLTSLGAVSSCETPLAFASIPGCTVMTDLKDAKAPPGCLTPERIPEVHHISQDPLHYSIASVSASQKIRELESMIGIDPGNRGIGHLLCKDELLKASLSLSHARSVLITTGFPTHFNHEPPEETDGPPGAVALVAFLQALEKEVAIIVDQRAWNLHQKIVEDAVEQGVLKTQIPILTYQGGSVEAAQAFLCKNGDPQTPRFDHLVAIERAGRAADGNYYNARKMNIKHLVDPIDDLFLAAKKIPGISSTGVGDGGNELGMGKVKEAVRRHIRHGDVIACDVEADFAVIAGVSNWGGYALACALYILYSCAVHSQYLRKAVGPSRAPGDQAWTQALPSVIKEEKMLGILVQHKVRSGVSGIVGMEVDGLPFHNTHAEMIQKLVDVTTAQV

SEQ ID NO: 993 - DNA, 1670 bp, Homo sapien
gggcaaaccctttgaaaaatattctaaatgaaaatgacatagtattcatagtggaaaaagtgcctttagaaaaggaagaaacaagtcatattgaagaacttcaatctgaagaaactgccatatctgatttctctactggcgaaaatgttggaccacttgctttaccagttgggaaggcaaggcagttaattggactttacaccatggctcacaatcctaatatgacccatttgaagattaatctgcctgttactgcccttccccccctttgggtaagatgtgacagttcagatcctgaaggtacttgttggctaggagctgagcttatcacaacaaacaacagcattacaggaattgtcttatatgtggtcagttgtaaagctgataaaaattattctgtaaatcttgaaaacctaaaaaatttacacaagaaaagacatcacttgtctactgtaacatccaaaggctttgcccagtatgagctctttaagtcctctgccttggatgatacaatcacagcatcacaaactgcgatcgctttggatatttcctggagtcctgtggatgagattcttcaaatccctccactctcttcaactgcaatctgaatattaaagtggaatcaggagagcccagaggtcctttgaatcatctctacagagaactgaaatttcttcttgttttggctgatggtttgaggactggtgtcactgaatggctcgagcccctggaagcaaaatctgctgttgaacttgttcaggaatttctgaatgacttaaataagctggatggatttggtgattctacaaaaaaagacactgaggttgagaccttgaagcatgacactgctgcagtcgatcgttccgtcaagcgtcttttcaaagttcggagtgatcttgattttgctgagcaactgtggtgcaaaatgagcagtagtgtgatttcataccaagactaggtgaagtgtttcacattgatcatccagagtctacaacgtggtgatatacagccatggctccatagtggaagtaacagtttactaagtaagctcattcatcagtcttatcatggaaccatggacacagtttctctcagtgggactattccagttcaaatgcttttggaaattggtttggacaaactaaagaaagattatatcagttttttcataggtcaggaacttgcatctttgaatcatttggaatacttcattgctccatcagtagatatacaagaacaggtttatcgtgtccaaaaactccaccatattctagaaatattagtcagttgcatgcctttcattaaatctcaacatgaactcctcttttctttaacacagatctgcataaagtattacaaacaaaatcctcttgatgagcaacacatttttcagctgccagtcagaccaactgctgtaaagaacttatatcaaagtgagaagccacagaaatggagagtggaaatatatagtggtcaaaagaagattaagacagtttggcaactgagtgacagctcacccataggccatctgaattttcacaaacctgatttttcggaattaacactaagcggtagcctggaagaaaggatattctttactaacatggttacctgcagccaggtgcatttcaagtgaagtgtgctgatgaagtcctctataagcacaagcc

SEQ ID NO: 994 - protein, 134 aa, Homo sapien
MAHNPNMTHLKINLPVTALPPLWVRCDSSDPEGTCWLGAELITTNNSITGIVLYVVSCKADKNYSVNLENLKNLHKKRHHLSTVTSKGFAQYELFKSSALDDTITASQTAIALDISWSPVDEILQIPPLSSTAI

SEQ ID NO: 995 - DNA, 1224 bp, Homo sapien
gttcggagcgggcgagcggagttagcagggctttactgcagagcgcgccgggcactccagcgaccgtggggatcagcgtaggtgagctgtggccttttgcgaggtgctgcagccatagctacgtgcgttcgctacgaggattgagcgtctccacccagtaagtgggcaagaggcggcaggaagtgggtacgcaggggcgcaaggcgcacagcctctagacgactcgctttccctccggccaacctctgaagccgcgtcctactttgacagctgcagggccgcggcctggtcttctgtgcttcaccatctacataatgaatcccagtatgaagcagaaacaagaagaaatcaaagagaatataaagaatagttctgtcccaagaagaactctgaagatgattcagccttctgcatctggatctcttgttggaagagaaaatgagctgtccgcaggcttgtccaaaaggaaacatcggaatgaccacttaacatctacaacttccagccctggggttattgtcccagaatctagtgaaaataaaaatcttggaggagtcacccaggagtcatttgatcttatgattaaagaaaatccatcctctcagtattggaaggaagtggcagaaaaacggagaaaggcgctgtatgaagcacttaaggaaaatgagaaacttcataaagaaattgaacaaaaggacaatgaaattgcccgcctgaaaaaggagaataaagaactggcagaagtagcagaacatgtacagtatatggcagagctaatagagagactgaatggtgaacctctggataattttgaatcactggataatcaggaatttgattctgaagaagaaactgttgaggattctctagtggaagactcagaaattggcacgtgtgctgaaggaactgtatcttcctctacggatgcaaagccatgtatatgaaatgcattaatatttgactgttgagaattttactgccgaagtttacctccactagttctttgtagcagagtacataactacataatgccaactctggaatcaaatttccttgtttgaatcctgggaccctattgcattaaagtacaaatactatgtatttttaatctatgatggtttatgtgaataggattttctcagttgtcagccatgacttatgtttattactaaataaacttcaaactcctgtggaaaaaaaaaaaaaaaaaaaaaaaaaaaaaaa

SEQ ID NO: 996 - protein, 209 aa, Homo sapien
MNPSMKQKQEEIKENIKNSSVPRRTLKMIQPSASGSLVGRENELSAGLSKRKHRNDHLTSTTSSPGVIVPESSENKNLGGVTQESFDLMIKENPSSQYWKEVAEKRRKALYEALKENEKLHKEIEQKDNEIARLKKENKELAEVAEHVQYMAELIERLNGEPLDNFESLDNQEFDSEEETVEDSLVEDSEIGTCAEGTVSSSTDAKPCI

SEQ ID NO: 997 - DNA, 1256 bp, Homo sapien
acgaggggagctccggctgcgtcttcccgcagcgctacccgccatgcgcctgccgcgccgggccgcgctggggctcctgccgcttctgctgctgctgccgcccgcgccggaggccgccaagaagccgacgccctgccaccggtgccgggggctggtggacaagtttaaccaggggatggtggacaccgcaaagaagaactttggcggcgggaacacggcttgggaggaaaagacgctgtccaagtacgagtccagcgagattcgcctgctggagatcctggaggggctgtgcgagagcagcgacttcgaatgcaatcagatgctagaggcgcaggaggagcacctggaggcctggtggctgcagctgaagagcgaatatcctgacttattcgagtggttttgtgtgaagacactgaaagtgtgctgctctccaggaacctacggtcccgactgtctcgcatgccagggcggatcccagaggccctgcagcgggaatggccactgcagcggagatgggagcagacagggcgacgggtcctgccggtgccacatggggtaccagggcccgctgtgcactgactgcatggacggctacttcagctcgctccggaacgagacccacagcatctgcacagcctgtgacgagtcctgcaagacgtgctcgggcctgaccaacagagactgcggcgagtgtgaagtgggctgggtgctggacgagggcgcctgtgtggatgtggacgagtgtgcggccgagccgcctccctgcagcgctgcgcagttctgtaagaacgccaacggctcctacacgtgcgaagatgtggacgagtgctcactagcagaaaaaacctgtgtgaggaaaaacgaaaactgctacaatactccagggagctacgtctgtgtgtgtcctgacggcttcgaagaaacggaagatgcctgtgtgccgccggcagaggctgaagccacagaaggagaaagcccgacacagctgccctcccgcgaagacctgtaatgtgccggacttaccctttaaattattcagaaggatgtcccgtggaaaatgtggccctgaggatgccgtctcctgcagtggacagcggcggggagaggctgcctgctctctaacggttgattctcatttgtcccttaaacagctgcatttcttggttgttcttaaacagacttgtatattttgatacagttctttgtaataaaattgaccattgtaggtaatcaggaaaaaaaaaaaaaaaaaaaaa

SEQ ID NO: 998 - protein, 321 aa, Homo sapien
MRLPRRAALGLLPLLLLLPPAPEAAKKPTPCHRCRGLVDKFNQGMVDTAKKNFGGGNTAWEEKTLSKYESSEIRLLEILEGLCESSDFECNQMLEAQEEHLEAWWLQLKSEYPDLFEWFCVKTLKVCCSPGTYGPDCLACQGGSQRPCSGNGHCSGDGSRQGDGSCRCHMGYQGPLCTDCMDGYFSSLRNETHSICTACDESCKTCSGLTNRDCGECEVGWVLDEGACVDVDECAAEPPPCSAAQFCKNANGSYTCEDVDECSLAEKTCVRKNENCYNTPGSYVCVCPDGFEETEDACVPPAEAEATEGESPTQLPSREDL

SEQ ID NO: 999 - DNA, 1561 bp, Homo sapien
ggctgacccacctacccgcgatcctgcccatggctgacgggctctttcggcgcagaccctggggtctcgagcagattcgcccggaccccgagtccgaaggcctgtttgacaagcctcccccggaagaccctcccgctgcccgcgggcccaggtcggcgtcggccgcgggcaagaaggctggtcggcgcgcgggcgggagggcgcaggggggccgcgccgggcagcccccgaaggccgcatcgcaccccccgcccaagaaggaggcgcctccactggacgagggctgctatctcgaccattttccgcacctctccatcttcatctacgcagccatcgccttctccatcacctcctgcatctttacctatatccatttacagcttgcctgagtggccagcgcgggacggggtgggcgcaggaccgagcggggagggaaagggaaaacggggctcggcattttgtgttttagaacagcgctgcacccccttcatgtagctttcgatgcttgtttctttccgtctttgttgtcactatctttgtctatcagtacgaaagtacaaagtagctgccggcaatgaaataggggtgctgtttgcacctgcaggttaggggtggaggcgtttagaattttggggtgtgattgagccccgtttataattagaatgcccctggacccctaccactctgtgacgtgggggcacgcgcagggatcccatcattttgtgtttggggagctcagagtgcgcccaatcttggaatctttaagggatgagccagacccagacccgcggccttctagagagggtccggcagggagggtcggcgccctggcccgggatgggccggagccctgtgatgctgcatcgcccccaggaggagccagctgtgccccagagttggcgcggccgagagaggacaagagcgcgcagcaggcgaagctggagggcgggactcgactttgttgtcgctgcccggaggagtcgagactggtacccggaggagctgtctcaccaggagaccacgtcctggaagtgtccgggactcgcgggacctgtggctgcagaccccgccggcacgcaggcccagagctggcgcactcctgaggatgagactctgggggccctagccggggtccacgggagggctgtccttggggactctaggatggcttcgttctggcccggctcacttctggagctgtgagacccaagacaaaaggggctgagggatttctcattgacaagagttcgtgcgggaaaaccacctgacccctagggatttgtcatcttaagactcaaaaggcttaataccaggaaccaccttggcaagatatttacccaccggccatctctgtttactcatgaatgttaaatgttaaaacgcagcgctctaaccctgcatattatttacttgcaaatgtctgtaatctgtaattgtgatgcctctgatggaataaattatctttttcagtctcctctaaaaaaaaaaaaaaaaaaaaaaaaaaaaaaaaaaaaaaaaaaaaaaaaaaaaaaaaaaaaaaaaaaaaaaaaaaaaaaaaaaa

SEQ ID NO: 1000 - protein, 146 aa, Homo sapien [sequence omitted]

SEQ ID NO: 1001 - DNA, 1707 bp, Homo sapien
cgctgttgttagtcaccgcggagccgccgaaacctgcaggagtctactatgcaactgcatactggatgcctgctgaaaagacagtacaagtcaaaaatgtaatggacaagaatggggacgcctatggcttttacaataactctgtgaaaaccacaggctggggcatcctggagatcagagctggctatggctctcaaaccctgagcaatgagatcatcatgtttgtggctggctttttggagggttacctcactgccccacacatgaatgaccactacacaaacctctacccacagctgatcacgaaaccttccatcatggataaagtgcaggattttatggagaagcaagataagtggacccggaaaaatatcaaagaatacaagactgattcattttggagacatacaggctatgtgatggcacaaatagatggcctctatgtaggagcaaagaagagggctatattagaagggacaaagccaatgaccctgttccagattcagttcctgaatagtgttggagatctattggatctgattccctcactctctcccacaaaaaacggcagcctaaaggtttttaagagatgggacatgggacattgctccgctcttatcaaggttcttcctggatttgagaacgtcctttttgctcactcaagctggtacacgtatgcagccatgctcaggatatataaacactgggacttcaacatcatagataaagataccagcagtagtcgcctctctttcagcagttacccagggtttttggagtctctggatgatttttacattcttagcagtggattgatattgctgcagaccacaaacagtgtgtttaataaaaccctgctaaagcaggtaatacccgagactctcctgtcctggcaaagagtccgtgtggccaatatgatggcagatagtggcaagaggtgggcagacatcttttcaaaatacaactctggcacctataacaatcaatacatggttctggacctgaagaaagtaaagctgaaccacagtcttgacaaaggcactctgtacattgtggagcaaattcctacatatgtagaatattctgaacaaactgatgttctacggaaaggatattggccctcctacaatgttcctttccatgaaaaaatctacaactggagtggctatccactgttagttcagaagctgggcttggactactcttatgatttagctccacgagccaaaattttccggcgtgaccaagggaaagtgactgatacggcatccatgaaatatatcatgcgatacaacaattataagaaggatccttacagtagaggtgacccctgtaataccatctgctgccgtgaggacctgaactcacctaacccaagtcctggaggttgttatgacacaaaggtggcagatatctacctagcatctcagtacacatcctatgccataagtggtcccacagtacaaggtggcctccctgtttttcgctgggaccgtttcaacaaaactctacatcagggcatgccagaggtctacaactttgattttattaccatgaaaccaattttgaaacttgatataaaatgaaggagggagatgacggactagaagactgtaaataagataccaaaggcactattttagctatgtttttcccatcagaattatgcaataaaatatattaatttgtcaaaaaaaaaaaaaaaaa

SEQ ID NO: 1002 - protein, 506 aa, Homo sapien
MPAEKTVQVKNVMDKNGDAYGFYNNSVKTTGWGILEIRAGYGSQTLSNEIIMFVAGFLEGYLTAPHMNDHYTNLYPQLITKPSIMDKVQDFMEKQDKWTRKNIKEYKTDSFWRHTGYVMAQIDGLYVGAKKRAILEGTKPMTLFQIQFLNSVGDLLDLIPSLSPTKNGSLKVFKRWDMGHCSALIKVLPGFENVLFAHSSWYTYAAMLRIYKHWDFNIIDKDTSSSRLSFSSYPGFLESLDDFYILSSGLILLQTTNSVFNKTLLKQVIPETLLSWQRVRVANMMADSGKRWADIFSKYNSGTYNNQYMVLDLKKVKLNHSLDKGTLYIVEQIPTYVEYSEQTDVLRKGYWPSYNVPFHEKIYNWSGYPLLVQKLGLDYSYDLAPRAKIFRRDQGKVTDTASMKYIMRYNNYKKDPYSRGDPCNTICCREDLNSPNPSPGGCYDTKVADIYLASQYTSYAISGPTVQGGLPVFRWDRFNKTLHQGMPEVYNFDFITMKPILKLDIK

SEQ ID NO: 1003 - DNA, 2684 bp, Homo sapien
cggaagcaggaagtgagtttgcgaacggagcagctgctgcagggcccatggcggacacccagtacatcctgcccaatgacatcggcgtgtctagcctggactgccgtgaggccttccgcctgctgtcacccacagagcgcctctatgcctaccacctgtcccgtgccgcctggtacggaggcctggctgtgctgcttcagacctcccctgaggccccctacatctatgctctgctcagccgcctcttccgcgcccaggaccccgaccagctgcgccaacatgccctggctgaaggccttaccgaggaggagtatcaggcgttcctggtctatgccgcgggtgtttactccaacatgggcaactacaagtcctttggtgacaccaagtttgttcccaacttgcccaaggaaaagctggaacgggtgatcctagggagtgaggctgctcagcagcacccagaagaagtcaggggcctctggcagacctgcggggagcttatgttctctctggagccaaggcttcgacacctcggactggggaaggagggaatcaccacctatttctctgggaattgtaccatggaagatgccaaattggcccaggactttctggactcacagaacctcagtgcctacaacacccggctcttcaaagaggtcgatggagaagggaagccctactacgaggtgcggctggcttctgtgcttggctcagagccttccctggactctgaggtgacttccaagctgaagagctatgaattccggggaagccctttccaggtgacccggggggactacgcgcccatcctccagaaggtggtggagcagctggagaaagccaaggcctatgcagccaacagccaccaggggcagatgctggcccagtatatagagagcttcacccagggctccatcgaggcccacaagaggggctcccgcttctggatccaggacaaaggccccatcgtggagagttacatcgggttcatcgagagctaccgcgacccctttggttcccgaggagaatttgaaggtttcgtagctgtggtgaacaaggccatgagtgccaagtttgagcggctggtggcgagcgcagagcagctgctgaaggagctgccctggcccccaacctttgagaaggacaagttcctcacccctgacttcacctccctggatgttctcaccttcgctggctccggcatccctgccggcatcaacatccccaactacgatgatctgaggcagacggaaggctttaagaacgtgtcgctggggaatgtgctggctgtggcctacgccacgcagcgggagaagcttacctttctggaggaggatgacaaggacctgtacatcctctggaaggggccctccttcgatgtgcaggtgggcctgcacgagctgctgggccatggcagtggcaagctcttcgtacaggacgaaaaaggagcattcaactttgaccaggaaacagtgatcaacccagagacgggcgagcagattcagagctggtatcggagcggggagacctgggatagcaagttcagcaccatcgcctccagctacgaagagtgccgggctgagagcgtgggtctctacctctgtctccacccgcaagtgctggagatctttggctttgagggggctgatgcggaggacgtgatctacgtgaactggctcaacatggttcgggccgggctgctcgctctggagttctacacacctgaggccttcaactggcgacaggcccatatgcaggcccggtttgtgatcctgagagtcttgctggaggctggcgagggactcgttaccatcactcccaccacaggctccgatgggcgcccagatgcccgggtccgcctcgaccgcagcaagatccggtctgtgggcaagcctgctctagagcgcttcctgcggagacttcaggtgctgaagtccacaggggatgtggccggagggcgggccctgtacgaggggtatgcaacggtcactgatgcgccccccgagtgcttcctcaccctcagggacacggtgctgctgcgtaaggaatctcggaagctcattgttcagcccaacactcgccttgaaggctcagacgtgcagcttctggaatacgaggcgtcagctgctggcctcatccgatccttctctgagcgtttcccagaggatggacccgagttggaggagatcctcacacagctggccacagccgatgcccgattctggaagggccccagtgaggccccatctggccaagcttgaggaagatgtgtggccttgcccccaattccatcagaccaaggctgcaagtggccctccattcgtgtgtgtatttaggggctggggagggggaggggcaggagcttggaccttggtactacctcagctgagggtggtgacacaaccccttccatttgtcagcactttccagcctgccaattgcttcccctctgtgatctcatttcatctgcactgccatacgtggagtgagcaagacagggcttaccatcctgtctaccagatgaggaaatggcagttctgagaagtcactggtctagatcccgcaggtggcacgtgacagctagggttcaaaacgttctcaccaaatccaatgctcctcacatattaattttataaccagacaaataaatattagagacaaccaaaaaaaaaaaaaaaaaaaaa

SEQ ID NO: 1004 - protein, 737 aa, Homo sapien
MADTQYILPNDIGVSSLDCREAFRLLSPTERLYAYHLSRAAWYGGLAVLLQTSPEAPYIYALLSRLFRAQDPDQLRQHALAEGLTEEEYQAFLVYAAGVYSNMGNYKSFGDTKFVPNLPKEKLERVILGSEAAQQHPEEVRGLWQTCGELMFSLEPRLRHLGLGKEGITTYFSGNCTMEDAKLAQDFLDSQNLSAYNTRLFKEVDGEGKPYYEVRLASVLGSEPSLDSEVTSKLKSYEFRGSPFQVTRGDYAPILQKVVEQLEKAKAYAANSHQGQMLAQYIESFTQGSIEAHKRGSRFWIQDKGPIVESYIGFIESYRDPFGSRGEFEGFVAVVNKAMSAKFERLVASAEQLLKELPWPPTFEKDKFLTPDFTSLDVLTFAGSGIPAGINIPNYDDLRQTEGFKNVSLGNVLAVAYATQREKLTFLEEDDKDLYILWKGPSFDVQVGLHELLGHGSGKLFVQDEKGAFNFDQETVINPETGEQIQSWYRSGETWDSKFSTIASSYEECRAESVGLYLCLHPQVLEIFGFEGADAEDVIYVNWLNMVRAGLLALEFYTPEAFNWRQAHMQARFVILRVLLEAGEGLVTITPTTGSDGRPDARVRLDRSKIRSVGKPALERFLRRLQVLKSTGDVAGGRALYEGYATVTDAPPECFLTLRDTVLLRKESRKLIVQPNTRLEGSDVQLLEYEASAAGLIRSFSERFPEDGPELEEILTQLATADARFWKGPSEAPSGQA

SEQ ID NO: 1005 - DNA, 4221 bp, Homo sapien
cgataacgatttgtgttgtgagaggcgcaagctgcgatttctgctgaacttggaggcatttctacgacttttctctcagctgaggcttttcctccgaccctgatgctcttcaattcggtgctccgccagccccagcttggcgtcctgagaaatggatggtcttcacaataccctcttcaatcccttctgactggttatcagtgcagtggtaatgatgaacacacttcttatggagaaacaggagtcccagttcctccttttggatgtaccttctcttctgctcccaatatggaacatgtactagcagttgccaatgaagaaggctttgttcgattgtataacacagaatcacaaagtttcagaaagaagtgcttcaaagaatggatggctcactggaatgccgtctttgacctggcctgggttcctggtgaacttaaacttgttacagcagcaggtgatcaaacagccaaattttgggacgtaaaagctggtgagctgattggaacatgcaaaggtcatcaatgcagcctcaagtcagttgccttttctaagtttgagaaagctgtattctgtacgggtggaagagatggcaacattatggtctgggataccaggtgcaacaaaaaagatgggttttataggcaagtgaatcaaatcagtggagctcacaatacctcagacaagcaaaccccttcaaaacccaagaagaaacagaattcaaaaggacttgctccttctgtggatttccagcaaagtgttactgtggtcctctttcaagacgagaataccttagtctcagcaggagctgtggatgggataatcaaagtatgggatttacgtaagaattatactgcttatcgacaagaacccatagcatccaagtctttcctgtacccaggtagcagcactcgaaaacttggatattcaagtctgattttggattccactggctctactttatttgctaattgcacagacgataacatctacatgtttaatatgactgggttgaagacttctccagtggctattttcaatggacaccagaactctaccttttatgtaaaatccagccttagtccagatgaccagtttttagtcagtggctcaagtgatgaagctgcctacatatggaaggtctccacaccctggcaacctcctactgtgctcctgggtcattctcaagaggtcacgtctgtgtgctggtgtccatctgacttcacaaagattgctacctgttctgatgacaatacactaaaaatctggcgcttgaatagaggcttagaggagaaaccaggaggtgataaactttccacggtgggttgggcctctcagaagaaaaaagagtcaagacctggcctagtaacagtaacgagtagccagagtactcctgccaaagcccccagggtaaagtgcaatccatccaattcttccccgtcatccgcagcttgtgccccaagctgtgctggagacctccctcttccttcaaatactcctacgttctctattaaaacctctcctgccaaggcccggtctcccatcaacagaagaggctctgtctcctccgtctctcccaagccaccttcatctttcaagatgtcgattagaaactgggtgacccgaacaccttcctcatcaccacccatcactccacctgcttcggagaccaagatcatgtctccgagaaaagcccttattcctgtgagccagaagtcatcccaagcagaggcttgctctgagtctagaaatagagtaaagaggaggctagactcaagctgtctggagagtgtgaaacaaaagtgtgtgaagagttgtaactgtgtgactgagcttgatggccaagttgaaaatcttcatttggatctgtgctgccttgctggtaaccaggaagaccttagtaaggactctctaggtcctaccaaatcaagcaaaattgaaggagctggtaccagtatctcagagcctccgtctcctatcagtccgtatgcttcagaaagctgtggaacgctacctcttcctttgagaccttgtggagaagggtctgaaatggtaggcaaagagaatagttccccagagaataaaaactggttgttggccatggcagccaaacggaaggctgagaatccatctccacgaagtccgtcatcccagacacccaattccaggagacagagcggaaagacattgccaagcccggtcaccatcacgcccagctccatgaggaaaatctgcacatacttccatagaaagtcccaggaggacttctgtggtcctgaacactcaacagaattatagattctaatctgagtgagttactgagctttggtccactaaaacaagctgagctttggtccactaaaacaagatgaaaaatacaagagtgactctataactctggtctttaagaaagctgccttttcatttttagacaaaatcttttcaacgctgaaatgtacctaatctggttctactaccataatgtatatgcagcttcccgaggatgaatgctgtgtttaaatttcataaagtaaatttgtcactctagcattttgaatgaatagtcttcactttttaaattattcatcttctctataataatgacatcccagttcatggaggcaaaaaacaagtttcttgttatcctgaaactttctatgctcagtggaaagtatctgccagccacagcatgaggcctgtgaaggctgactgagaaatcctctgctgaagacccctggttctgttctgcctccaacatgtataattttatttgaaatacataatcttttcactatgcttttgtggggttttttttaagtatgtgtaaaaatgtgatgctcagataagtacatttatatcagttcagtgttaaaatgcagtctcttgagttaaagtcatctttattttaaatgcagtgataaatgtcaactcttcggagaaactaggagaacaacaacagaaagctgtgtttgtcttttttctctcaaatatatctcccgtatgagatttcaggtccccatgttttcaccaagcaatctgctatgtcagccaacccaacatcactttctacaggaggttatgatttttgccatttactagaggaagatgttttatgaaatcaatttggggtttgaattcaggtgcagtcatcagttctttaggggctgcaatgttttaaaaaaaataagtcatcagattttaagaaaaaagtgatgatttcttattgatatttttgtaacagaatatagctcttaactgaaaatccagaaccagaaacataaatcttgagtttcttttcatgtacataaaaagcaatagccttttagtatagatagccctgagccaaaaagtaatagaattttctctagatatttaatacagagagtgtatagactgactctaagttaataatgtgcaaaatatcttaaacatccctccccttattcaacaattatgtatcagtgatcttgaaccattgttttatatttttcacctttgtaacctcatggaaagaggctttacatactttctatgtactatttacttagaagggagcccccttccagtcatgaaacttcatttgttttatccatatccctgaggactgtgtagactttatgtcagttctgtgtagactttatgtcagtttttgtcattatttgaaaatctattctgacaactttttaattcctttgatcttataagttaaagctgtaacaactgaaattgcatggatcaagtaagcatagttttatccagggagaaaaataaaaggaagccatagaattgctctggtcaaaaccaagcacaccatagccttaactgaatatttaggaaatctgcctaatctgcttatatttggtgtttgttttttgactgttgggctttgggaagatgttatttatgaccaatatctgccagtaacgctgtttatctcacttgctttgaaagccaatgggggaaaaaaatccatgaaaaaaaaaagattgataaagtagatgattttgtttgtatccctacccatctcctggcagccctactgagtgaaattgggatacatttggctgtcagaaattataccgagtctactgggtataacatgtctcacttggaaagctagtacttttaaatgggtgccaaaggtcaactgtaatgagataattatccctgcctgtgtccatgtcagactttgagctgatcctgaataataaagccttttacctt

SEQ ID NO: 1006 - protein, 730 aa, Homo sapien
MLFNSVLRQPQLGVLRNGWSSQYPLQSLLTGYQCSGNDEHTSYGETGVPVPPFGCTFSSAPNMEHVLAVANEEGFVRLYNTESQSFRKKCFKEWMAHWNAVFDLAWVPGELKLVTAAGDQTAKFWDVKAGELIGTCKGHQCSLKSVAFSKFEKAVFCTGGRDGNIMVWDTRCNKKDGFYRQVNQISGAHNTSDKQTPSKPKKKQNSKGLAPSVDFQQSVTVVLFQDENTLVSAGAVDGIIKVWDLRKNYTAYRQEPIASKSFLYPGSSTRKLGYSSLILDSTGSTLFANCTDDNIYMFNMTGLKTSPVAIFNGHQNSTFYVKSSLSPDDQFLVSGSSDEAAYIWKVSTPWQPPTVLLGHSQEVTSVCWCPSDFTKIATCSDDNTLKIWRLNRGLEEKPGGDKLSTVGWASQKKKESRPGLVTVTSSQSTPAKAPRVKCNPSNSSPSSAACAPSCAGDLPLPSNTPTFSIKTSPAKARSPINRRGSVSSVSPKPPSSFKMSIRNWVTRTPSSSPPITPPASETKIMSPRKALIPVSQKSSQAEACSESRNRVKRRLDSSCLESVKQKCVKSCNCVTELDGQVENLHLDLCCLAGNQEDLSKDSLGPTKSSKIEGAGTSISEPPSPISPYASESCGTLPLPLRPCGEGSEMVGKENSSPENKNWLLAMAAKRKAENPSPRSPSSQTPNSRRQSGKTLPSPVTITPSSMRKICTYFHRKSQEDFCGPEHSTEL

SEQ ID NO: 1007 - DNA, 1807 bp, Homo sapien
gcacgagggaagagggtgatccgacccggggaaggtcgctgggcagggcgagttgggaaagcggcagcccccgccgcccccgcagccccttctcctcctttctcccacgtcctatctgcctctcgctggaggccaggccgtgcagcatcgaagacaggaggaactggagcctcattggccggcccggggcgccggcctcgggcttaaataggagctccgggctctggctgggacccgaccgctgccggccgcgctcccgctgctcctgccgggtgatggaaaaccccagcccggccgccgccctgggcaaggccctctgcgctctcctcctggccactctcggcgccgccggccagcctcttgggggagagtccatctgttccgccagagccccggccaaatacagcatcaccttcacgggcaagtggagccagacggccttccccaagcagtaccccctgttccgcccccctgcgcagtggtcttcgctgctgggggccgcgcatagctccgactacagcatgtggaggaagaaccagtacgtcagtaacgggctgcgcgactttgcggagcgcggcgaggcctgggcgctgatgaaggagatcgaggcggcgggggaggcgctgcagagcgtgcacgcggtgttttcggcgcccgccgtccccagcggcaccgggcagacgtcggcggagctggaggtgcagcgcaggcactcgctggtctcgtttgtggtgcgcatcgtgcccagccccgactggttcgtgggcgtggacagcctggacctgtgcgacggggaccgttggcgggaacaggcggcgctggacctgtacccctacgacgccgggacggacagcggcttcaccttctcctcccccaacttcgccaccatcccgcaggacacggtgaccgagataacgtcctcctctcccagccacccggccaactccttctactacccgcggctgaaggccctgcctcccatcgccagggtgacactggtgcggctgcgacagagccccagggccttcatccctcccgccccagtcctgcccagcagggacaatgagattgtagacagcgcctcagttccagaaacgccgctggactgcgaggtctccctgtggtcgtcctggggactgtgcggaggccactgtgggaggctcgggaccaagagcaggactcgctacgtccgggtccagcccgccaacaacgggagcccctgccccgagctcgaagaagaggctgagtgcgtccctgataactgcgtctaagaccagagccccgcagcccctggggcccccggagccatggggtgtcgggggctcctgtgcaggctcatgctgcaggcggccgaggcacagggggtttcgcgctgctcctgaccgcggtgaggccgcgccgaccatctctgcactgaagggccctctggtggccggcacgggcattgggaaacagcctcctcctttcccaaccttgcttcttaggggcccccgtgtcccgtctgctctcagcctcctcctcctgcaggataaagtcatccccaaggctccagctactctaaattatggtctccttataagttattgctgctccaggagattgtccttcatcgtccaggggcctggctcccacgtggttgcagatacctcagacctggtgctctaggctgtgctgagcccactctcccgagggcgcatccaagcgggggccacttgagaagtgaataaatggggcggtttcggaagcgtcagtgtttccatgttatggatctctctgcgtttgaataaagactatctctgttgctcac

SEQ ID NO: 1008 - protein, 331 aa, Homo sapien
MENPSPAAALGKALCALLLATLGAAGQPLGGESICSARAPAKYSITFTGKWSQTAFPKQYPLFRPPAQWSSLLGAAHSSDYSMWRKNQYVSNGLRDFAERGEAWALMKEIEAAGEALQSVHAVFSAPAVPSGTGQTSAELEVQRRHSLVSFVVRIVPSPDWFVGVDSLDLCDGDRWREQAALDLYPYDAGTDSGFTFSSPNFATIPQDTVTEITSSSPSHPANSFYYPRLKALPPIARVTLVRLRQSPRAFIPPAPVLPSRDNEIVDSASVPETPLDCEVSLWSSWGLCGGHCGRLGTKSRTRYVRVQPANNGSPCPELEEEAECVPDNCV

SEQ ID NO: 1009 - DNA, 810 bp, Homo sapien
gctggagccgggccggggcgatgtggagcgcgggccgcggcggggctgcctggccggtgctgttggggctgctgctggcgctgttagtgccgggcggtggtgccgccaagaccggtgcggagctcgtgacctgcgggtcggtgctgaagctgctcaatacgcaccaccgcgtgcggctgcactcgcacgacatcaaatacggatccggcagcggccagcaatcggtgaccggcgtagaggcgtcggacgacgcgaatagctactggcggatccgcggcggctcggagggcgggtgcccgtgcgggtccccggtgcgctgcgggcaggcggtgaggctcacgcatgtgcttacgggcaagaacctgcacacgcaccacttcccgtcgccgctgtccaacaaccaggaggtgagtgcctttggggaagacggcgagggcgacgacctggacctatggacagtgcgctgctctggacagcactgggagcgtgaggctgctgtgcgcttacagcatgtgggcacctctgtgttcctgtcagtcacgggtgagcagtatggaagccccatccgtgggcagcatgaggtccacggcatgcccagtgccaacacgcacaatacgtggaaggccatggaaggcatcttcatcaagcctagtgtggagccctctgcaggtcacgatgaactctgagtgtgtggatggatgggtggatggagggtggcaggtggggcgtctgcagggccactcttggcagagactttgggtttgtaggggtcctcaagtgcctttgtgattaaagaatgttggtctatga

SEQ ID NO: 1010 - protein, 221 aa, Homo sapien
MWSAGRGGAAWPVLLGLLLALLVPGGGAAKTGAELVTCGSVLKLLNTHHRVRLHSHDIKYGSGSGQQSVTGVEASDDANSYWRIRGGSEGGCPCGSPVRCGQAVRLTHVLTGKNLHTHHFPSPLSNNQEVSAFGEDGEGDDLDLWTVRCSGQHWEREAAVRLQHVGTSVFLSVTGEQYGSPIRGQHEVHGMPSANTHNTWKAMEGIFIKPSVEPSAGHDEL

SEQ ID NO: 1011 - DNA, 896 bp, Homo sapien
  Unsure 886: Unknown base
acctccggaaaccgtagattccgggcggtcggagccgccgggagctgtagttctcccgcggctcagagaagtaggcagagagcggacctggcggccgggcagcatggcggggctggagctcttgtcggaccagggctaccgggtggacgggcggcgcgccggggagctgcgcaagatccaggcgcggatgggcgtgttcgcgcaggctgacggctcggcctacattgagcagggcaacaccaaggcactggctgtggtctacggcccgcacgagatccggggctcccgggctcgagccctgccggacagggccctagtgaactgtcaatatagttcagcgaccttcagcacaggtgagcgcaagcgacggccacatggggaccgtaagtcctgtgagatgggcctgcagctccgccagactttcgaagcagccatcctcacacagctgcacccacgctcccagattgatatctatgtgcaggtgctacaggcagatggtgggacctatgcagcttgtgtgaatgcagccacgctggcagtgctggatgccgggatacccatgagagactttgtgtgtgcgtgctcagctggcttcgtggacggcacagccctggcggacctcagccatgtggaggaagcagctggtggcccccagctggccctggccctgctgccagcctcaggacagattgcgctgcttgagatggatgcccggctgcacgaggaccacctggagcgggtgttggaggctgctgcccaggctgcccgagatgtgcacaccctcttagatcgagtggtccggcagcatgtgcgtgaggcctctatcttgctgggggactgaccacccagccacccatgtccagaataaaccctccttgcccacacnaaaaaaaaaa

SEQ ID NO: 1012 - protein, 245 aa, Homo sapien
MAGLELLSDQGYRVDGRRAGELRKIQARMGVFAQADGSAYIEQGNTKALAVVYGPHEIRGSRARALPDRALVNCQYSSATFSTGERKRRPHGDRKSCEMGLQLRQTFEAAILTQLHPRSQIDIYVQVLQADGGTYAACVNAATLAVLDAGIPMRDFVCACSAGFVDGTALADLSHVEEAAGGPQLALALLPASGQIALLEMDARLHEDHLERVLEAAAQAARDVHTLLDRVVRQHVREASILLGD

SEQ ID NO: 1013 - DNA, 2176 bp, Homo sapien; identical to SEQ ID NO: 17

SEQ ID NO: 1014 - protein, 216 aa, Homo sapien; identical to SEQ ID NO: 18

SEQ ID NO: 1015 - DNA, 923 bp, Homo sapien
ggcacgagggcaccgcaggagcaacggttggtcctgcggctgtgatgtcggtgttgaggcccctggacaagctgcccggcctgaacacggccaccatcttgctggtgggcacggaggatgctcttctgcagcagctggcggactcgatgctcaaagaggactgcgcctccgagctgaaggtccacttggcaaagtccctccctttgccctccagtgtgaatcggccccgaattgacctgatcgtgtttgtggttaatcttcacagcaaatacagtctccagaacacagaggagtccctgcgccatgtggatgccagcttcttcttggggaaggtgtgtttcctcgccacaggtgctgggcgggagagccactgcagcattcaccggcacaccgtggtgaagctggcccacacctatcaaagccccctgctctactgtgacctggaggtggaaggctttagggccaccatggcgcagcgcctggtgcgcgtgctgcagatctgtgctggccacgtgcccggtgtctcagctctgaacctgctgtccctgctgagaagctctgagggcccctccctggaggacctgtgagggtggctggcccctgggctgccccttctcatggcttcgtgctgactccataaacattctctgttgaggatgtccagtcagggcttgacaggcccaggctcagcccgccgtggctgggaaggttccctgcagtgccagtgctgcagcagggagagctgggcagaagcagcgagggggcccagctggcgagactgtagccccctcccactcccacactcactcttgcagagcctgtgtctttaagcagctggcgtgttacatctccatttaaggtttcctttgaacaaaaggtctgtggctaaaaaaagtttaaaaatcaaaaaaaaaaaaaaaaaa

SEQ ID NO: 1016 - protein, 180 aa, Homo sapien
MSVLRPLDKLPGLNTATILLVGTEDALLQQLADSMLKEDCASELKVHLAKSLPLPSSVNRPRIDLIVFVVNLHSKYSLQNTEESLRHVDASFFLGKVCFLATGAGRESHCSIHRHTVVKLAHTYQSPLLYCDLEVEGFRATMAQRLVRVLQICAGHVPGVSALNLLSLLRSSEGPSLEDL

SEQ ID NO: 1017 - DNA, 2048 bp, Homo sapien
gggagtaggaggtgtgaccggagggcgaaattggggcttcctctgctctggtgacccagaaccgtcaactgaaatgaccctgtctgtgtagtactccggcaggatgggcctcggagcgtaaaggcggcaaaaacaaaaatattaaaaaaaaggagagagggacaaaaaaaagaaaacccgaaagtttcagctgcattgctgcggaacgttttttagccagaaggcgaaagaagaaatcggaagtgacgtcgcggccaaaacaagcccgggcttggaggcctgtactgaagctggcctcagatgggaaggcccgactcgctgtctgctgtcgtcggtggtcgcgagaccttgcactctcaccgggtcggcctccagcccctgtgcccgggatccgctcgccgcggatgagcgagagtttcttcctgggacttttcgggcacagctggccggtggcgacagaacggactttctttcctgcaagagtctcccctccagcgggagacagcgggctcctgtctcgggacgctgggacacctgtcgcctatttttaaatatccagattccaagaacacactggatactgctcttacaaaaccaagaggaaatcatgaagaaatgttttagttattgaaactacagttgaaatcatggatacatcaacaaatctggatattggagcccagcttatcgtggaagagtgtcccagcacttatagcctaactggcatgccagacattaaaatagaacatccactggacccaaattcagaagaagggtcagctcagggtgttgccatgggaatgaaattcatattgcctaaccgatttgatatgaatgtgtgttctcgatttgtgaagtccttaaatgaagaagatagtaaaaatattcaagatcaggttaactctgacctggaggtggcatctgtcctatttaaagctgaatgcaatatccatacatctccttctccgggaattcaagtaaggcatgtctacaccccctctacaacaaagcatttctcacccataaaacagtcaaccactttaaccaacaaacacagaggaaatgaggtctctaccacacctctgttagcaaattctttgtctgttcaccagttggctgctcagggagagatgctctatctggctactcgtatcgaacaagaaaatgttatcaatcacacggatgaagaaggatttactcctctgatgtgggctgcagcacacgggcaaatagctgtggtagagttcctacttcagaatggtgctgatccccaacttttaggaaaaggtcgagaaagtgcactgtcgttggcctgtagtaaaggctacacagatattgtcaaaatgctgcttgattgtggagttgatgtaaatgaatatgattggaatggaggaacacctctgctttatgctgtacatggaaatcatgtgaaatgtgtaaagatgctcttagaaagtggggctgatccaacaattgaaactgactctggatataattctatggatctagctgtagccctaggctatagaagtgttcaacaggttattgagtcacatttgttgaagctgcttcaaaatatcaaggagtagacacagtcatcagaaaatgtctgcccttttgtttacttcttggtccttataaatgatagttttgtttacttataaatttttacctcagttgcaatatttactggtttttagtaggttttaataaatatttctctgagtaattcactggtttataataaatgtaatactctttttataactatgttttactgtatatttaaaattataaattaatgttttcgtggcatgtaaatttttatggtacagatagttatcatcagtctttgtatcaagtgctgtaatttgacattttcagaaattattctaccctagtcatcttcactcgtgtattaagtcattcactttatatagggtttgctataaatccctagaaaaaaattgttcttattgttgaattaaaaagtgcacagtgtgattgtttacaaaatgatattataaataaataaaatacttcttctg

SEQ ID NO: 1018 - protein, 313 aa, Homo sapien
MDTSTNLDIGAQLIVEECPSTYSLTGMPDIKIEHPLDPNSEEGSAQGVAMGMKFILPNRFDMNVCSRFVKSLNEEDSKNIQDQVNSDLEVASVLFKAECNIHTSPSPGIQVRHVYTPSTTKHFSPIKQSTTLTNKHRGNEVSTTPLLANSLSVHQLAAQGEMLYLATRIEQENVINHTDEEGFTPLMWAAAHGQIAVVEFLLQNGADPQLLGKGRESALSLACSKGYTDIVKMLLDCGVDVNEYDWNGGTPLLYAVHGNHVKCVKMLLESGADPTIETDSGYNSMDLAVALGYRSVQQVIESHLLKLLQNIKE

SEQ ID NO: 1019 - DNA, 4768 bp, Homo sapien
atccttgccgcccgccccggcccagccgcgtcccggagccgtcgggcatggagccgtggaagcagtgcgcgcagtggctcatccattgcaaggtgctgcccaccaaccaccgggtgacctgggactcggctcaggtgttcgaccttgcgcagaccctccgcgatggagtcctgctctgccagctgcttaacaacctccgggcgcactccatcaacctgaaggagatcaacctgaggccgcagatgtcccagtttctctgtttgaagaacataaggacatttctcacggcctgttgtgagacgtttggaatgaggaaaagtgaacttttcgaggcatttgacttgtttgatgttcgtgactttggaaaggttatagaaacattatcacgactttctcgaacacctatagcattggccacaggaatcaggcccttcccaacagaagaaagcattaatgatgaagacatctacaaaggccttcctgatttaatagatgaaacccttgtggaagatgaagaagatctctatgactgtgtttatggggaagatgaaggtggagaagtctatgaggacttaatgaaggcagaggaagcacatcagcccaaatgtccagaaaatgatatacgaagttgttgtctagcagaaattaagcagacagaagaaaaatatacagaaactttggagtcaatagaaaagtatttcatggcaccactaaaaagatttctgacagcagcagaatttgattcagtattcatcaacattcctgaacttgtaaaacttcatcggaacctaatgcaagagattcatgattccattgtaaataaaaatgaccagaacttgtaccaagtttttattaactacaaggaaagattggttatttacgggcagtactgcagtggagtggagtcagccatctctagtttagactacatttctaagtcaaaagaagatgtcaaactgaaattagaggaatgttccaaaagagcaaataatgggaaatttactcttcgagacttgcttgtggttcctatgcaacgtgttttaaagtaccaccttctcctccaggaactggtcaaacataccactgatccgactgagaaggcaaatctgaaactggctcttgatgccatgaaggacttggcacaatatgtgaatgaagtgaaaagagataatgagacccttcgtgaaattaaacagtttcagctatctatagagaatttgaaccaaccagttttgctttttggacgacctcagggagatggtgaaattcgaataaccactctagacaagcataccaaacaagaaaggcatatcttcttatttgatttggcagtgatcgtatgtaagagaaaaggtgataactatgaaatgaaggaaataatagatcttcagcagtacaagatagccaataatcctacaaccgataaagaaaacaaaaagtggtcttatggcttctacctcatccatacccaaggacaaaatgggttagaattttattgcaaaacaaaagatttaaagaagaaatggctagaacagtttgaaatggctttgtctaacataagaccagactatgcagactccaatttccacgacttcaagatgcataccttcactcgagtcacatcctgcaaagtctgccagatgctcctgaggggaacattttatcaaggctatttatgttttaagtgtggagcgagagcacacaaagaatgtttgggaagagtagacaattgtggcagagttaattctggtgaacaagggacactcaaactaccagagaaacggaccaatggactgcgaagaactcctaaacaggtggatccaggtttaccaaagatgcaggtcattaggaactattctggaacaccacccccagctctgcatgaaggaccccctttacagctccaggccggggataccgttgaacttctgaaaggagatgcacacagtctgttttggcagggcagaaatttagcatctggagaggttggattttttccaagtgatgcagtcaagccttgcccatgtgtgcccaaaccagtagattattcttgccaaccctggtatgctggagcaatggaaagattgcaagcagagaccgaacttattaatagggtaaatagtacttaccttgtgaggcacaggaccaaagagtcaggagaatatgcaattagcattaagtacaataatgaagcaaagcacatcaagattttaacaagagatggcttttttcacattgcagaaaatagaaaatttaaaagtttaatggaacttgtggagtactacaagcatcattctctcaaggaagggttcagaaccttagatacaactctgcagtttccatacaaggagccagaacattcagctggacagaggggtaatagagcaggcaacagcttgttaagtccaaaagtgctgggcattgccatcgctcggtatgacttctgtgcaagagatatgagagagttgtccttgttgaaaggagatgtggtgaagatttacacaaagatgagtgcaaatggctggtggagaggagaagtaaatggcagggtgggctggtttccatccacatatgtggaagaggatgaataaattcaaatcccgtgttgcaccctgcaccaaaaatttcagagaagggataaatagaagcctgcacagcatcgtgaattaactgaagtgtttaaaaagctgcatttctggctgttcaacatcctccctccttagcccctcctaagtcttaatgctgagatttctaaagatgctggtactgacagattaatggcttgcctagagctgtgcaagaaacagcctgccagtctgtcattgtcagggaccagggcaaaaccaagagctgttcttcccagaagagccctgcaaacacattggttcgtgcttccctttacttcttctggtcagataccatgaatgccagtcatcagtaaatcttaatacacttttgctttattctcacatgccattcaccagattatttgatggtacaaagaagcagaagtgtaattttccttttcccagcatgacgaaaaattggagttctgccatttgagcagcttactggaaagatccagccttacttgtcttaaattgtccaacaaggtgactcattgcccggcaaacacttttaccctcagatgttactcatgatattataaaatatgaggccagtgctcaggtttgcatcataagtgagctatccctgaagggttttaattacttatttggtgtcctgattatatttgcaaacttctttataaaaggtgaaaaaagcacacaaaagagagggtgtcttcatattaaaccttcacaaccttcatgatttcataggattattttggaaatatagcacttgactttatgaaaggatctgggctaggtatattaggggtagttgccaataacctgaagaagctggcattgtttacagaaacagatcaagggctataatttatgtcattttatagcagcagtatctattaatacatgccttttcctcccatccacctcccccgcacacacacaaagatgacctgggacatgatttttttattcccacattttcttggagcacaaacaactttgttgaggattttggaaggaaagcacaactgggtcctttattcatttctgggacagaaagagggtcagtggacttttgtgggcctccagcttctctcagagtctccccctctgcagcccatcctgggagtgtattaactggagggaagatgggtcttgcagtacatttgttttgcccagccatcactcttttttgtgaggagcctaaatacattcttcctggggtccagagtccccattcaaggcagtcaagttaagacactaacttggccctttcctgatggaaatatttcctccatagcagaagttgtgttctgacaagactgagagagttacatgttgggaaaaaaaagaagcattaacttagtagaactgaaccaggagcattaagttctgaaattttgaatcatctctgaaatgaagcaggtgtagcctgccctctcatcaatccgtctgggtgccagaactcaaggttcagtggacacatccccctgttagagaccctcatgggctaggacttttcatctaggatagattcaagacctttacctcagaattatgtaaactgtgattgtgttttagaaaaattattatttgctaaaaccatttaagtctttgtatatgtgtaaatgatcacaaaaatgtattttataaaatgttctgtacaataaagttacacctcaaagtgtactcttggaatggattctttcctgtaaagtcttatctgcgactctgtctcgggaatgttttgtctgttgccgtcagccgaactttgttatggagggagcagcctcacacaagcagaaacactcctgtggatggtattgtagcatgtattgtttattttagtcaatagaccctctccttataaatggtgtttagtcttcctgttgcatttcatgggcctgggggtttcctagcagaggatattggagcccctttttgtgacattaccaattacatctttgtccacgtttaatactttgttttggaaaatttaaatgctgcagatttgtgtagagttctaataccaaagacagaagtaaatgttttccatatactttgtcttgcctgtatgcagcccttgtgtaatatggtgaattagagtggtatttcactttgtattattttgtaaatatgtcaatataataaatagtgactaaaaaaaaaaaaaa

SEQ ID NO: 1020 - protein, 847 aa, Homo sapien
MEPWKQCAQWLIHCKVLPTNHRVTWDSAQVFDLAQTLRDGVLLCQLLNNLRAHSINLKEINLRPQMSQFLCLKNIRTFLTACCETFGMRKSELFEAFDLFDVRDFGKVIETLSRLSRTPIALATGIRPFPTEESINDEDIYKGLPDLIDETLVEDEEDLYDCVYGEDEGGEVYEDLMKAEEAHQPKCPENDIRSCCLAEIKQTEEKYTETLESIEKYFMAPLKRFLTAAEFDSVFINIPELVKLHRNLMQEIHDSIVNKNDQNLYQVFINYKERLVIYGQYCSGVESAISSLDYISKSKEDVKLKLEECSKRANNGKFTLRDLLVVPMQRVLKYHLLLQELVKHTTDPTEKANLKLALDAMKDLAQYVNEVKRDNETLREIKQFQLSIENLNQPVLLFGRPQGDGEIRITTLDKHTKQERHIFLFDLAVIVCKRKGDNYEMKEIIDLQQYKIANNPTTDKENKKWSYGFYLIHTQGQNGLEFYCKTKDLKKKWLEQFEMALSNIRPDYADSNFHDFKMHTFTRVTSCKVCQMLLRGTFYQGYLCFKCGARAHKECLGRVDNCGRVNSGEQGTLKLPEKRTNGLRRTPKQVDPGLPKMQVIRNYSGTPPPALHEGPPLQLQAGDTVELLKGDAHSLFWQGRNLASGEVGFFPSDAVKPCPCVPKPVDYSCQPWYAGAMERLQAETELINRVNSTYLVRHRTKESGEYAISIKYNNEAKHIKILTRDGFFHIAENRKFKSLMELVEYYKHHSLKEGFRTLDTTLQFPYKEPEHSAGQRGNRAGNSLLSPKVLGIAIARYDFCARDMRELSLLKGDVVKIYTKMSANGWWRGEVNGRVGWFPSTYVEEDE

SEQ ID NO: 1021 - DNA, 1482 bp, Homo sapien
gttgacgtgttcgactttcctgataattctgatgtctcaagcattggcaggctgggtgaaaatgagaaagatgaagaaacttatgagacctttgatcctcctttacatagcacagctatatatgctgatgaagaagaattctccaaacattgtggactgtctctctcttcaactcctccaggaaaagaagcaaaaagaagttcagacacttctggaaatgaagcaagtgaaatcgaatctgtaaaaattagtgcaaaaaagccaggaagaaagctcaggcccattagtgatgactctgaaagcattgaagaaagtgatacaaggagaaaagttaaatcagcagagaaaataagtacacaacgtcatgaggttattcgaaccacagcgtcttcagaactttcagagaaaccagctgagtctgtcacttctaaaaagacaggaccccttagtgcccagccctctgttgaaaaagagaacttggcaatagaaagtcaatcgaaaactcagaaaaaagggaagatatctcatgacaaaaggaagaaatcaagaagtaaagccataggctcagatacttctgacattgtgcacatttggtgtccagaaggaatgaaaaccagtgacatcaaggagttgaatattgttttgcctgaatttgagaaaacccacctagagcatcaacaaagaatagaatctaaagtttgtaaggcagccatcgccacattttatgttaatgttaaagaacaattcatcaaaatgcttaaagaaagccagatgttgacaaatctgaaaaggaagaatgctaagatgatttcagatatcgaaaagaaaaggcagcgtatgattgaagtccaggatgaactgcttcggttagagccacagctgaaacaactacaaacaaaatatgatgaacttaaagagagaaagtcctcccttaggaatgcagcatatttcttatctaatttaaaacagctttatcaagattattcagatgttcaagctcaagaaccaaacgtaaaggaaacgtatgattcatccagccttccagctctgttatttaaagcaagaacacttctgggagccgaaagccatctgcgaaatatcaaccatcagttagagaagctccttgaccagggatgagaagagcagtctactaaaatgtgcctataggaagactagtctcatgctgttaccttctgaaactgtacctttataaatcaattgttttgcaaagaagttatggcctacttagaatctaaaatttgttattcaaattaaatggctgtgaacaatgttaaatagcatcagtttgtccaatagttttaaaggccataatcatcttttctggttaatatcttgagtaattttaaaatgttgacaccttaatcggtcccaggtatgagctataataaacttgtaaaattaaaaaaaaaaaaaaaaaaaaaaaaaaaaaaaaaaaaaaaaaaaaaaaaaaaaaaaaaaaaa

SEQ ID NO: 1022 - protein, 176 aa, Homo sapien
MKTSDIKELNIVLPEFEKTHLEHQQRIESKVCKAAIATFYVNVKEQFIKMLKESQMLTNLKRKNAKMISDIEKKRQRMIEVQDELLRLEPQLKQLQTKYDELKERKSSLRNAAYFLSNLKQLYQDYSDVQAQEPNVKETYDSSSLPALLFKARTLLGAESHLRNINHQLEKLLDQG

SEQ ID NO: 1023 - DNA, 1746 bp, Homo sapien
atgtgggggcgcacggcgcggcggcgctgcccgcgggaactgcggcgcggccgggaggcgctgttggtgctcctggcgctactggcgttggccgggctgggctcggtgctgcgggcgcagcgtggggccggggccggggctgccgagccgggacccccgcgcaccccgcgccccgggcggcgcgagccggtcatgccgcggccgccggtgccggcgaacgcgctgggcgcgcggggcgaggcggtgcggctgcagctgcagggcgaggagctgcggctgcaggaggagagcgtgcggctgcaccagattaacatctacctcagcgaccgcatctcactgcaccgccgcctgcccgtgcgctggaacccgctgtgcaaagagaagaaatatgattatgataatttgcccaggacatctgttatcatagcattttataatgaagcctggtcaactctccttcggacagtttacagtgtccttgagacatccccggatatcctgctagaagaagtgatccttgtagatgactacagtgatagagagcacctgaaggagcgcttggccaatgagctttcgggactgcccaaggtgcgcctgatccgcgccaacaagagagagggcctggtgcgagcccggctgctgggggcgtctgcggcgaggggcgatgttctgaccttcctggactgtcactgtgagtgccacgaagggtggctggagccgctgctgcagaggatccatgaagaggagtcggcagtggtgtgcccggtgattgatgtgatcgactggaacaccttcgaatacctggggaactccggggagccccagatcggcggtttcgactggaggctggtgttcacgtggcacacagttcctgagagggagaggatacggatgcaatcccccgtcgatgtcatcaggtctccaacaatggctggtgggctgtttgctgtgagtaagaaatattttgaatatctggggtcttatgatacaggaatggaagtttggggaggagaaaacctcgaattttcctttaggatctggcagtgtggtggggttctggaaacacacccatgttcccatgttggccatgttttccccaagcaagctccctactcccgcaacaaggctctggccaacagtgttcgtgcagctgaagtatggatggatgaatttaaagagctctactaccatcgcaacccccgtgcccgcttggaaccttttggggatgtgacagagaggaagcagctccgggacaagctccagtgtaaagacttcaagtggttcttggagactgtgtatccagaactgcatgtgcctgaggacaggcctggcttcttcgggatgctccagaacaaaggactaacagactactgctttgactataaccctcccgatgaaaaccagattgtgggacaccaggtcattctgtacctctgtcatgggatgggccagaatcagtttttcgagtacacgtcccagaaagaaatacgctataacacccaccagcctgagggctgcattgctgtggaagcaggaatggatacccttatcatgcatctctgcgaagaaactgccccagagaatcagaagttcatcttgcaggaggatggatctttatttcacgaacagtccaagaaatgtgtccaggctgcgaggaaggagtcgagtgacagtttcgttccactcttacgagactgcaccaactcggatcatcagaaatggttcttcaaagagcgcatgttatga

SEQ ID NO: 1024 - protein, 581 aa, Homo sapien
MWGRTARRRCPRELRRGREALLVLLALLALAGLGSVLRAQRGAGAGAAEPGPPRTPRPGRREPVMPRPPVPANALGARGEAVRLQLQGEELRLQEESVRLHQINIYLSDRISLHRRLPVRWNPLCKEKKYDYDNLPRTSVIIAFYNEAWSTLLRTVYSVLETSPDILLEEVILVDDYSDREHLKERLANELSGLPKVRLIRANKREGLVRARLLGASAARGDVLTFLDCHCECHEGWLEPLLQRIHEEESAVVCPVIDVIDWNTFEYLGNSGEPQIGGFDWRLVFTWHTVPERERIRMQSPVDVIRSPTMAGGLFAVSKKYFEYLGSYDTGMEVWGGENLEFSFRIWQCGGVLETHPCSHVGHVFPKQAPYSRNKALANSVRAAEVWMDEFKELYYHRNPRARLEPFGDVTERKQLRDKLQCKDFKWFLETVYPELHVPEDRPGFFGMLQNKGLTDYCFDYNPPDENQIVGHQVILYLCHGMGQNQFFEYTSQKEIRYNTHQPEGCIAVEAGMDTLIMHLCEETAPENQKFILQEDGSLFHEQSKKCVQAARKESSDSFVPLLRDCTNSDHQKWFFKERML

SEQ ID NO: 1025 - DNA, 1554 bp, Homo sapien
aattatatatttttactctatgtttctctacatgtttttttctttccgttgctggcggaagaggcacgtgcgctgctgaatggagctggtcgctggttgctacgagcaggtcctctttgggttcgctgtacacccggagcccaaggcttgcggcgaccacgagcaatggactcttgtggctgacttcactcaccatgctcacactgcctccttgtcagcagtagctgtaaatagtcgttttgtggtcactgggagcaaagatgaaacaattcacatttatgacatgaaaaagaagattgagcatggggctctagtgcatcacagtggtacaataacttgcctgaaattctatggcaacaggcatttaatcagtggagcggaagatggactcatctgtatctgggatgcaaagaaatgggaatgcctgaagtcaattaaagctcacaaaggacaggtgaccttcctttctattcacccatctggcaagttggccctgtcggttggtacagataaaactttaagaacgtggaatcttgtagaaggaagatcagcattcataaaaaatataaaacaaaatgctcacatagtagaatggtccccaagaggagagcagtatgtagttatcatacagaataaaatagacatctatcagcttgacactgcatccattagtggcaccatcacaaatgaaaagagaatttcctctgttaaatttctttcagagtctgtccttgcagtggctggagatgaagaagttataaggttttttgactgtgattcactagtgtgcctctgcgaatttaaagctcatgaaaacagggtaaaggacatgttcagttttgaaattccagagcatcatgttattgtttcagcatcgagtgatggtttcatcaaaatgtggaagcttaagcaggataagaaagttcccccatctttactctgtgaaataaacactaatgccaggctgacgtgtcttggagtgtggctagacaaagtggcagacatgaaaagccttcctccagctgcagagccttctcctgtaagtaaagaacagtccaaaattggcaaaaaggagcctggtgacacagtgcacaaagaagaaaagcggtcaaaacctaacacaaagaaacgcggtttaacaggtgacagtaagaaagcaacaaaagaaagtggcctgatatcaaccaagaagaggaaaatggtagaaatgttggaaaagaagaggaaaaagaagaaaataaaaacaatgcagtgaatcacagatgtctcctgaaagaactcttttagatgaaatcattctactcaaatgtaccttaatttttttttttccctgagtaaaagcaagaaatttcttcctttggaaaaaatatatatattaaaaaaccacttttagatggttttttttaaaaaaaaaaaaaaaactggtaaaattacttttggcagacagtgttttatgaattatgtatcatgttgatatataatatgttaatgtgtcatgtaatttttactttgtacaaagcaaataaagatctttctcaaaaaaaaaaaaaaaaa

SEQ ID NO: 1026 - protein, 391 aa, Homo sapien
MELVAGCYEQVLFGFAVHPEPKACGDHEQWTLVADFTHHAHTASLSAVAVNSRFVVTGSKDETIHIYDMKKKIEHGALVHHSGTITCLKFYGNRHLISGAEDGLICIWDAKKWECLKSIKAHKGQVTFLSIHPSGKLALSVGTDKTLRTWNLVEGRSAFIKNIKQNAHIVEWSPRGEQYVVIIQNKIDIYQLDTASISGTITNEKRISSVKFLSESVLAVAGDEEVIRFFDCDSLVCLCEFKAHENRVKDMFSFEIPEHHVIVSASSDGFIKMWKLKQDKKVPPSLLCEINTNARLTCLGVWLDKVADMKSLPPAAEPSPVSKEQSKIGKKEPGDTVHKEEKRSKPNTKKRGLTGDSKKATKESGLISTKKRKMVEMLEKKRKKKKIKTMQ

SEQ ID NO: 1027 - DNA, 2805 bp, Homo sapien
aaacccaaagcggccgccgtaggcgaaggtgaagatggctgcctctgcctttgctggtgcagtgagagcagcttcaggaatcctacggcccctgaatattttggcatcttcaacctaccgcaactgtgtcaagaatgcctctcttatttctgcattgtccactggacgttttagtcatattcagacaccagttgtttcctccactcccagacttaccacatctgagagaaacctgacatgtgggcatacctcagtgatccttaatagaatggcccccgtgcttccaagtgtcctgaagctgccagtcagatctctaacatacttcagtgcaagaaaaggcaagagaaagaccgtgaaagctgtcatcgataggtttcttcgacttcattgtggcctttgggtgaggagaaaggctggctataagaaaaaattatggaaaaagacacctgcaaggaagaagcgattgagggaatttgtattctgcaataaaacccagagtaaactcttagataaaatgacgacgtccttctggaagaggcgaaactggtacgttgatgatccttatcagaagtatcatgatcgaacaaacctgaaagtatagatcagaagtttcacttgtttctcagttattggatatgtatctttgtgtacatatctttgcaaaaatggataagtacaaaacttgatgtaaattgtaccaatgaatacgtaaacatacagtgacaacattaaacttagaaaagttttaaaacttaatggatcagactttgccagatttggttagggaaacagaaatttagaatggtgcattatttttaacaaatggtattggcttaactagttgtttcagttatgctcttttagttgcaaggaatctcaagtgggacaaacataaaaagactcaaaagctacaagttagctcaagcaatgtgacattatttcaaggatatgtgccagggaattcaggaaccacctcaccaaccccatctcccactcagaaatcacctcccagcctcaggaagagtagaaattgggtggtgctcctcagcaggggaaggtggatgtttaggcttgggctctgcatgcatgtgacttgcttctttttgcattgttaactccattctctctattcaccaacttctctacacagcttttgcatacttacagtttctgttcctttgtaataactttaacttgcacctttgaggttcttttctacatgatgaccttcagctcctgctgctagtctccaattgccaagggaatttaactgggccagactacctttttatactaggtctggttgggtcattgtctagagtagggattggctgtccttaagtcaggagcccgctttgtattagcaggtttgcatgcagcaaaaaaacagttatgtgagcagtttcacttggaggttcacatggggtggcagcacacttaacatctaacacaccaggttcattgtgttcataacacttgtcatttactgtaacaacattttttcataggagagtaaatagcccttcagcatgctcattcatgaaacagaagaggctgtacaagtgaagacaagggctttttatgcaagttttgaaagataggtatttattttttctagagacaggagttttgctctgttgcccaggctggagtgcagtggtgcaatcatagctcattgaagcctcgcactcctgggctcaagtggtcctcctgcctcagcttactgagtaaggatatgtatttcttaaaagttagtttatccacttcagatttcatgttttcatttgtaaggataaacttttcccacaaattttcaacaatcattgtagaaactaagggggagaaagtaatctcagttgttttagaaacgaaaaagttaagcattgtttacttgaagtgggcagggaagcagcactgagtaaagttcaattgagtggttacagtctagggcagtggttcccaactctccgatcagaatcatctgggaagcattttcaaacagcaaagtactttgaaaaccattattaaatagaattatgcatgaattactgtttcagatcctttaatgtggtagttggtaataataagatgaaattcctctgttgttagtaaaattatgaaattgaagttctgcagcatgtcaggccaggattattagggagattcctcgaaactagtgtgtgtttattaaaaggagaaaggataacaatagaatgttctaaaaccagaagtccaagtgcgtgtctacttatgggaccaataaataaagaacagacatttgatttgaggtgaggtaaaagcctgaaacatggaatggcattctgttttgatggattttcatttcttcgcacttctgagacggcaaagccaaccacttagaagccttccacatctttgtcacctgcctggctcctgctctctgatgtacctctgggtagtgagatggaaatggtgcctgcagaagttggggagaaggatacttttgcacagcctccatgatgtctttattgcaaatatggatgacaagggtctctgttacaggggcctcagagcaccttcgtttctcctctagaccagggacaggtgtagagataaggactggcaaccagagcctcagcatccaaagatggactgaagtgggatggctgacaggcacataacttacgggaaagggaatttcatacatacgatttttgttttgtgggtaggagggcttatcatcaacactgattttataatctgacaataaatgtctttcattaaagagtttacctaaatgaaaaaaaaaaaaaaaaaaaaaaaaaa

SEQ ID NO: 1028 - protein, 188 aa, Homo sapien [sequence omitted]

SEQ ID NO: 1029 - DNA, 2579 bp, Homo sapien
ggcgccgggggacacgttggctgcgttttcggcgggcctcccgggtacaaaaatggctgtggctagcgatttctacctgcgctactacgtagggcacaagggcaagtttgggcacgagtttctggagttcgaatttcggccggacggaaagcttagatatgccaacaacagcaattacaaaaatgatgtgatgatcagaaaagaggcttatgtgcacaagagtgtaatggaagaactgaagagaattattgatgacagtgaaattacaaaagaagatgatgctttgtggcctccccctgatagggttggccgacaggagcttgaaattgtaattggagatgagcacatatcttttaccacatcaaaaataggttctcttattgatgtaaatcagtcaaaggatcctgaaggccttcgagtattttactatttggtacaagacttgaaatgtttagttttcagtcttattggattacacttcaagattaaaccaatttaaattgtatgttttcaggctgtttgtatatttaattaagggatgggaggggttatttgtcatttacagtattggggtttttatgaatgtgaagcaaacaaaaaaaatttgtatgtaaactgaaaataagaaaatacattagcaagcttaatggttatccttacttgagtccacatgggttggacagtccccacacacattaaattctgtaaatgaaagccaccttttgttaaaaatttgctctaataaaacataccaaatcctggttgcagagtagttttttgttttttccaggaggctatgtctctaattcactttagagataataagaaattgttctggtagatacatcctgtgacagaagatactttaggtggaactatgtagccagattcccatccatgaaaggcaagtgtagattgtcccttatttccttcatacatgattggatttaattttggggggcttatacaaggtctagtttttttttacagttatgacaaacccctcagggattattcacatttaaatattttcagttacaagcagtgaggtcctaaagtgttacaagagtacagtctaccccatgttaggcatatctttgattatgtctttattccttatttcacaatgtatttggtgtgtaggggaggggggagaactaaatgagttttcagctttataaattgttaaacatttagacaaacatatatgtatgtatgaatgtacataaatatttttaactcctattgaccacgagtctcacttcagtttcccagttcctttcaacctctttctgatagatttcctctttcattacttttagtaaccatgttccttgtttccttttattcttccatctgaagccccactcttaaaaagttgcactgttccagtagttataatccacttgccctaggaacaagttagcactgaattttgggtggaataattagtttctgaaggcttgccaggacccctgagcaggtaggctctagagtcgggcagtccaataacttttttgcaataatggaaacgtcctatgtgcagtccaatagggtagcaactggccaaatgaggcctactgattacttgaggtgtgccttgtataactgaatttatggtgctatttaaacaatttttttctaacgtgaaaaggataaaacataaaaaactcttgagaactataaagtgaacacctatatgcctacccctacctagattctatacttaacatcttttttactgtaatatctctattataataaatcttggtttttcacttaactggtgtaattggtgccaataaactactttttttgtagtgctatttaattttgattaaatttagatagccacgtgtctagcggctaccgtttggacagtatagctctagagcatggcttggtaacctgtttgccatggagcactagatggtccttttcactcctcaaaatgcatgcccattgccttcaggtttgccatggaaagtcaaatgatttccacttcattatgcaagtacgctatcatcttcaggtcttttgtatgtaaaatgtttctgttccagttgtagaccttgatgattgtgcagtatgaaatcgtattgtaattttcttgcatttagatgtcaacctcagaaacaggaacaatcgtcttttgaacttccagtaggcccacagttgttggttgttcctcaaaacaggttgtggctcctgttgaataagatgatccattaaaaactgaacaaggttgaggagaaatagtgcttacgttgaaaaatctttaagtctttgtccccgttctctaacttccttacgttttcgtttatttagctccatccccactatctactagaatttctcatatttaaaccaagatgggagactaggtcattaggaaaatattaccgtctacaattttcttatactttgatctgtcttttatttgattgtaagttgctgatggacagtgatcattagaaactgaattttgtataatactagttttatatgaaactagatatttattgcgctcaggttatgttccttttacctccttccttaataaagagaccacttgaaat

SEQ ID NO: 1030 - protein, 148 aa, Homo sapien
MAVASDFYLRYYVGHKGKFGHEFLEFEFRPDGKLRYANNSNYKNDVMIRKEAYVHKSVMEELKRIIDDSEITKEDDALWPPPDRVGRQELEIVIGDEHISFTTSKIGSLIDVNQSKDPEGLRVFYYLVQDLKCLVFSLIGLHFKIKPI

SEQ ID NO: 1031 - DNA, 1695 bp, Homo sapien; identical to SEQ ID NO: 23

SEQ ID NO: 1032 - protein, 410 aa, Homo sapien; identical to SEQ ID NO: 24

SEQ ID NO: 1033 - DNA, 600 bp, Homo sapien
agtcttggcggaggtgaccaaagccacgtaatgtccgtagttcgctcatccgtccatgccagatggattgtggggaaggtgattgggacaaaaatgcaaaagactgctaaagtgagagtgaccaggcttgttctggatccctatttattaaagtattttaataagcggaaaacctactttgctcacgatgcccttcagcagtgcacagttggggatattgtgcttctcagagctttacctgttccacgagcaaagcatgtgaaacatgaactggctgagatcgttttcaaagttggaaaagtcatagatccagtgacaggaaagccctgtgctggaactacctacctggagagtccgttgagttcggaaaccacccagctaagcaaaaatctggaagaactcaatatctcttcagcacagtgaagcgggagtggaagaaggatctaaagggaaaaactgacatgtttatgttatggaaaaagaaatttttctaagtttcatcacaaactgtgtccagtttctctgtggtgtttatgaaatagctaaaagcaaatgaagtaaagggcatactatggtttttcacaaaaaaaaaaaaaaaaa

SEQ ID NO: 1034 - protein, 130 aa, Homo sapien
MSVVRSSVHARWIVGKVIGTKMQKTAKVRVTRLVLDPYLLKYFNKRKTYFAHDALQQCTVGDIVLLRALPVPRAKHVKHELAEIVFKVGKVIDPVTGKPCAGTTYLESPLSSETTQLSKNLEELNISSAQ

SEQ ID NO: 1035 - DNA, 2232 bp, Homo sapien
ggcgcgctttcaaacgctcaggtttcctaccttccggctgcttgggaacttctttcttgcccgccaagcccgcagccacccgggcgcggcgggactcctagacccggcgctgcgatgaagaggacccgcgacgaggtggatgcgacgctgcagatcgccaagctgaatgcggccgagctgctgccggcggtgcactgcctgggcttcggccctggggccagcggcgctgcagccggcgacttctgcctgctggagctggagcccacgctgtgccagcagctggaggatggacacagtcttgtgattcgtggtgataaagacgagcaagctgtgctgtgcagtaaagacaaaacatacgacttgaagatagcagacacttccaatatgttgcttttcattcctggttgtaaaactccggaccagttgaagaaggaagattcacactgtaacattattcacactgagatctttggtttttctaataattattgggaattaagaagacgtagacccaagttaaagaagctaaagaaacttttgatggaaaatccatatgaaggacctgacagtcaaaaagagaaggattcaaatagctcaaaatatacaactgaagatttgcttgatcaaattcaggcaagtgaggaagaaataatgacccaattacaagttctaaatgcctgtaagattggaggttattggaggattcttgaatttgattatgagatgaaacttctgaatcatgtaactcagcttgtggattctgaatcatggtcttttggtaaagttcctttgaacacatgccttcaggaactcggaccattggagccagaggaaatgatagaacactgtcttaaatgttatgggaagaaatatgtagatgaaggcgaagtttattttgagttggatgctgataaaatatgtagagcagcagcacgaatgctacttcagaatgcggtgaaattcaatctcgctgagtttcaagaagtgtggcagcagagtgttcctgaaggaatggtaactagtcttgatcagcttaagggtttagcgctggtggatagacactcgagaccagaaatcatatttttgctgaaagtagatgatttacctgaggataatcaggaacgttttaatagccttttctctctaagggagaagtggacagaagaagatattgctccatatattcaagatttgtgtggagagaagcaaaccataggtgcattactcactaaatattctcgttcttcgatgcaaaatggtgttaaagtttataattcgagaagacccatttcttaaaagaacaacagtcttttcttcaggactcaagttgctttataaagttgctggatacaagaaaaataacttgtacttttatttctgacttttagaaacctagtcttctaaggcatttttctcctcatcttaagcattttgaaactactgttatttcttaaatgttataggatgtagctttaaaattatatttgtactatgtacacagtgtaaacaaggacaaaagaattctttcctatattatgtctgaggtctctatgatttatttaaagtttggctttttatatttaaaatgtcatttctttacttaggatttgatgttctaatcattaatacacttaagttttccagagaactaaatagtaatagtttcatagaagagaactatttattcacttaaatatcatttctcaagtgagtgagttcccctctacttttagccttccacccaaactggaagcctctaggtgctatcaattatttatatccatcgtttacatccatgaaattggctgaataattactcctctgcctggcgtagacatgtgctttgggaaaaaaacgagtttataatcctataatgaagaatactggcacaggcaatgctcactcgaaaacttcaagtaatttctagttggttttggaatgcttgataaagttcctttacagctttattttcctgatttgttttggtttagatcaaagttcaaattaattttaacttagctaatgaactcatcaccaggacagttggagggggtaggccgaggttaaatggtccacgtttcaaaaatgttaatggctaatccataattaaagaaggtttaactgttactgaagtttacaagttttattgtcatgaacatgaaatacaaacacgatggcttcgaaatgtctttcaataaatgtttctgcatttaaaaaaaaaaaaaaaaaaaa

SEQ ID NO: 1036 - protein, 393 aa, Homo sapien
MKRTRDEVDATLQIAKLNAAELLPAVHCLGFGPGASGAAAGDFCLLELEPTLCQQLEDGHSLVIRGDKDEQAVLCSKDKTYDLKIADTSNMLLFIPGCKTPDQLKKEDSHCNIIHTEIFGFSNNYWELRRRRPKLKKLKKLLMENPYEGPDSQKEKDSNSSKYTTEDLLDQIQASEEEIMTQLQVLNACKIGGYWRILEFDYEMKLLNHVTQLVDSESWSFGKVPLNTCLQELGPLEPEEMIEHCLKCYGKKYVDEGEVYFELDADKICRAAARMLLQNAVKFNLAEFQEVWQQSVPEGMVTSLDQLKGLALVDRHSRPEIIFLLKVDDLPEDNQERFNSLFSLREKWTEEDIAPYIQDLCGEKQTIGALLTKYSRSSMQNGVKVYNSRRPIS

SEQ ID NO: 1037 - DNA, 760 bp, Homo sapien
gagttttcatttgtggtgagattctctcccaggccacaagacatttcctgctcggaaccttgtttactaatttccactgcttttaaggccctgcactgaaaatgcaagctcaggcgccggtggtcgttgtgacccaacctggagtcggtcccggtccggccccccagaactccaactggcagacaggcatgtgtgactgtttcagcgactgcggagtctgtctctgtggcacattttgtttcccgtgccttgggtgtcaagttgcagctgatatgaatgaatgctgtctgtgtggaacaagcgtcgcaatgaggactctctacaggacccgatatggcatccctggatctatttgtgatgactatatggcaactctttgctgtcctcattgtactctttgccaaatcaagagagatatcaacagaaggagagccatgcgtactttctaaaaactgatggtgaaaagctcttaccgaagcaacaaaattcagcagacacctcttcagcttgagttcttcaccatcttttgcaactgaaatatgatggatatgcttaagtacaactgatggcatgaaaaaaatcaaatttttgatttattataaatgaatgttgtccctgaacttagctaaatggtgcaacttagtttctccttgctttcatattatcgaatttcctggcttataaactttttaaattacatttgaaatataaaccaaatgaaatattttaactgataaaaaaaaaaaaaaaaaataaaaaa

SEQ ID NO: 1038 - protein, 115 aa, Homo sapien
MQAQAPVVVVTQPGVGPGPAPQNSNWQTGMCDCFSDCGVCLCGTFCFPCLGCQVAADMNECCLCGTSVAMRTLYRTRYGIPGSICDDYMATLCCPHCTLCQIKRDINRRRAMRTF

SEQ ID NO: 1039 - DNA, 1308 bp, Homo sapien
ggaagaaaacctgaaaaagaccccaaagaagaatatgaaaatggtaactggagccgtagcgtcggtgctggaagacgaggccacagacacttctgatagtgaaggaagctgtggatcggaaaaggaccacttttattctgatgatgacgcaatagaagctgacagtgagggtgatgctgagccctgtgacaaagaaaatgaaaatgatggagaatcaagtgttgggactaatatgggctgggcagatgctatggctaaagtcctcaacaagaaaactcctgaaagtaaacctactattctggtcaaaaataagaagctggaaaaggaaaaagaaaagttaaagcaagaaagactagagaaaataaaacagcgtgataagaggctggagtgggaaatgatgtgcagagtaaagccagatgttgtccaagacaaagagacagagagaaatcttcagagaattgcaacaaggggtgtggtgcaattatttaatgctgttcagaaacatcaaaagaatgttgatgaaaaggttaaggaagctggaagttctatgagaaagcgtgctaagttgatatcaactgtttccaagaaagatttcatcagtgttttgagagggatggatggaagtacaaatgagactgcttcaagcaggaagaaaccaaaagccaaacagactgaagtgaaatcagaagaaggcccaggttggacgatcctacgtgatgatttcatgatgggagcatctatgaaagactgggacaaggaaagtgatgggccagatgacagcagaccagaatctgcaagtgactctgatacataaagcatcataggaaatacaattgcagtcgttttattttttctagaaaaatatgtcatcctctgatagttggggaattataaggataccatttgtaagaaagccaaaagacttttgccagatttcatatttccccttttcatgtacactttatatatacttcattaaaattatattttaaacccttgtataattttaagcattgttcctcagaacatttgtaaaaggatatatttctgcttgaccagcgagatgtgcattttgccaggatcatattggtcatgtctattggtgtattatttcagtatcaccaatgttttcagaaatacagtactaattcatcattaaactctttgaagttaatatttttctgccttctaacttatagactcaactatgtatctgtagtttttgggaatggttggtgttttttgctttgtgttgggaagttattgagaaaacctatataataaaatttaaaattatagtttttcaaa

SEQ ID NO: 1040 - protein, 259 aa, Homo sapien
MKMVTGAVASVLEDEATDTSDSEGSCGSEKDHFYSDDDAIEADSEGDAEPCDKENENDGESSVGTNMGWADAMAKVLNKKTPESKPTILVKNKKLEKEKEKLKQERLEKIKQRDKRLEWEMMCRVKPDVVQDKETERNLQRIATRGVVQLFNAVQKHQKNVDEKVKEAGSSMRKRAKLISTVSKKDFISVLRGMDGSTNETASSRKKPKAKQTEVKSEEGPGWTILRDDFMMGASMKDWDKESDGPDDSRPESASDSDT

SEQ ID NO: 1041 - DNA, 3159 bp, Homo sapien
gctgccgccccgcactcgggcgagcgcgggagccgcacagtagacggagcgcgcccggccgagcgggccatggccgcgggggccgccgccgcaggtggtggcgcgcggtgaggagagcgcggcgccccctccggggcggatggaacgcggctcggcgggcgggcagtgccggcgtccgcggctggaatggtgctggctgtgttggtcggtgcctgcgttctgaagcccgagaggagccacaatggagacgccgccgctgcctcccgcatgcacaaagcagggtcatcagaagcctctcgattcaaaagatgataataccgaaaaacactgcccagtgacagtgaatccttggcatatgaagaaagctttcaaagtcatgaacgaattaagaagtcaaaatttgctgtgcgatgtcacaattgtggcagaagacatggaaatttctgctcatagagtggtgctggccgcctgtagtccttattttcatgccatgtttacaggtgagatgagtgagagccgagcaaagagagttagaataaaagaggtagatggctggaccctgaggatgctaattgattatgtttacactgcagaaattcaggttacagaagaaaatgtacaggtacttctcccagcagctggtctcttacagttacaggatgtgaagaagacttgttgtgaatttttggaatcccagcttcaccctgtcaactgcttaggaatccgggcttttgctgatatgcatgcatgtactgaccttctgaacaaggccaacacctatgcagagcaacattttgcagatgttgtacttagtgaagaatttctcaatcttggcatcgaacaagtgtgcagcttaatctcaagtgacaaacttaccatttcttcagaagagaaggtatttgaagcagtaatagcatgggtgaaccatgacaaggatgtgaggcaagagtttatggcccgactgatggaacatgtacggttacctttgcttcctcgggaatatttagttcagagggttgaagaggaagcattggtcaagaatagcagtgcttgcaaagattacctcattgaagcaatgaagtaccatttgctgccaacagagcagcgtatattaatgaagagtgtccggacccggctgaggacacccatgaaccttcccaaattgatggtggtggttgggggccaagcaccaaaggctatccggagtgtggaatgctatgactttaaagaagaaaggtggcaccaagtagcagagttgccttccaggaggtgcagggcaggcatggtctacatggctggacttgtttttgctgttggtggctttaatggctcattaagagttcgcactgtagattcctacgaccctgtgaaggaccagtggaccagcgttgctaacatgagagaccggagaagcactttgggagctgctgtgttaaatggattattatacgctgtgggaggctttgatgggagtacaggtttgtcatctgtggaagcatacaacataaagtctaatgagtggtttcatgtagctcccatgaatacaaggaggagcagtgttggtgtgggtgttgttggaggtttgctctatgctgtaggaggttatgatgtagcatcacgtcagtgtcttagcacagtagaatgctataatgctacaacaaatgagtggacctatatagcagaaatgagcaccaggcggagtggagcaggtgttggtgtgttaaacaatttattgtatgctgtaggaggtcatgatggccctttagtacgaaaaagtgttgaagtatatgatcccaccactaacgcatggagacaggttgcagatatgaacatgtgcagaagaaatgcaggagtttgtgcagttaatggtctgttatatgttgttggaggggatgatggttcctgtaacttggcgtcagtagaatattataacccaacaaccgataaatggacagttgtgtcatcgtgtatgagcacagggagaagttatgcaggggtcacagttattgataaacgattatgagcctgaaggacattttcagcatatttatacatgagaaacagccttcaacaagtatttgtgaagtgactgagaatctagcacttctccacttgtagctgcactttaagtctcagcagaagatacgatcgtctgcctttataggcctcagatactgaagattatttttggtagaagcaccgtgtaggctttttctgcaatgagcagcagctgactgaattttcataagaaacttggactgcaggacttaatctgtagtctttagacaacagttgctttcataaagactagttcttatcaaccttgaatgactacagattattttgtgaaggaggatgaagtaatgtgtgttcttgtaaaattaaattttatctttatttcttctaaaaatctgtataccaggaactgaaaatctttgaacagatattaaaatctacgtaagtatacaaactagttgagggatacactgtttgcttttataaaataactttgattacatgaatataataaattatgtgcatataaatgtgtgtctatatgctttcctttaaatatgtttgaaaagatgtttgaaacttgattatactatttataattggcacagtactttgaattatgccagtactacattgtaaaacagagttgtattttttgatatttaacaatgcttaacactttaaatgccacttctgaggaatggacctggtgtaacacacttgaatatgtgtgatgccaaactttttaaaatacaatataagttatgcttatttattattttctttagtttaatcttggtcatgttttggtgtgtatttttaatttttttcttaaattaacactttggcatgaacattactgcaggtttttgatgaatataatgaatgtatggaattcaattgaatttgcatggtcttcggaattttttctgtgtgtataaatttagctgctattaacagaagagagaactttctgtgagtagccatgtgtgttgatcagatacagtttttctgagatcttcaattaatctcactttaaaaatgaccaaaacatgtctttcttgaattaactttgaataaaagtttgtatattaaaaaaaaaaaaaaaaaaaaaaaaaaaaaaaaagaaaaaaaaaaaaaaaa

SEQ ID NO: 1042 - protein, 593 aa, Homo sapien
METPPLPPACTKQGHQKPLDSKDDNTEKHCPVTVNPWHMKKAFKVMNELRSQNLLCDVTIVAEDMEISAHRVVLAACSPYFHAMFTGEMSESRAKRVRIKEVDGWTLRMLIDYVYTAEIQVTEENVQVLLPAAGLLQLQDVKKTCCEFLESQLHPVNCLGIRAFADMHACTDLLNKANTYAEQHFADVVLSEEFLNLGIEQVCSLISSDKLTISSEEKVFEAVIAWVNHDKDVRQEFMARLMEHVRLPLLPREYLVQRVEEEALVKNSSACKDYLIEAMKYHLLPTEQRILMKSVRTRLRTPMNLPKLMVVVGGQAPKAIRSVECYDFKEERWHQVAELPSRRCRAGMVYMAGLVFAVGGFNGSLRVRTVDSYDPVKDQWTSVANMRDRRSTLGAAVLNGLLYAVGGFDGSTGLSSVEAYNIKSNEWFHVAPMNTRRSSVGVGVVGGLLYAVGGYDVASRQCLSTVECYNATTNEWTYIAEMSTRRSGAGVGVLNNLLYAVGGHDGPLVRKSVEVYDPTTNAWRQVADMNMCRRNAGVCAVNGLLYVVGGDDGSCNLASVEYYNPTTDKWTVVSSCMSTGRSYAGVTVIDKRL

SEQ ID NO: 1043 - DNA, 1956 bp, Homo sapien; identical to SEQ ID NO: 21

SEQ ID NO: 1044 - protein, 287 aa, Homo sapien [sequence omitted]

SEQ ID NO: 1045 - DNA, 3221 bp, Homo sapien
tgtcaaaagcctgcacacgagacccccgtgggccaggactgacttcctccccacacagggctgggcggggcaagcaggaaggagcctgttacagtcaaggtgacgcatccttgccgggccagcccgaacagcagctgggtcggcaagcgacaggagcacgggtcatcttttccccagaggcgtcggaatggacctgtgccacccagagcccgcggagctgagcagcggggagacggaagagttacagaggatcaagtggcaccgaaagcagctcctggaggacatccagaagctgaaggatgagattgcagatgtgtttgcccaaatcgactgcttcgagagtgcggaggagagccggatggcccagaaggagaaggagctgtgtattgggcgcaagaagttcaacatggaccccgccaagggtatccagtatttcattgagcacaagctgctgacccctgacgtccaggacattgcacggttcctgtataaaggcgagggcctcaacaagacagccattggtacctacctgggggagagggatcccatcaacctgcaggtcctccaggccttcgtggactgccacgagttcgccaacctcaacctcgtccaggccctcaggcagttcctgtggagcttccggctgccgggcgaggcccagaagatagaccggatgatggaggcctttgccactcgatactgcctctgcaacccaggcgtcttccagtccacagacacctgctacgtgttgtccttctccatcatcatgctcaacaccagcctccacaatcccaacgtccgggacaggccgcctttcgagcgctttgtgtccatgaaccgcggcatcaacaatggtagcgacctgcccgaggaccagctgcggaacctcttcgacagcatcaagagtgagccattctccatccctgaggacgacggcaatgacctcactcacaccttcttcaatccagaccgggagggttggctgctcaagctagggggccgcgtgaagacgtggaaacggcgctggttcatcctgaccgacaactgcctctactacttcgagttcaccactgacaaggagccacggggaattatacctcttgagaacctctcggtgcagaaggtggatgaccccaagaagccattctgcctggagctctacaaccctagctgccgaggccagaaaatcaaggcctgcaagaccgatggcgacggcagggtggtggagggcaagcacgaatcgtaccgcatctcagccaccagtgccgaggaacgtgaccagtggatcgagtccatccgagccagcatcacccgtgtccccttctacgacctggtctctactcggaagaagaagattgccagcaagcagtgagattcctggaggtggcactgggggctggtcaccctgagagtcccatcgcctgcagcacctggagacccacctcccaccccagtgcactcttttgggccacagacatcattgctgttccccgttacctcgagctgactctagaggggaaggcagagctcaggagggtgggtgggagctgcagtgggctcagagtccagcaatgaggccccctggcctgggcacccagctgcaggcccctgccctacgtgcactacaggaaggggtgaggagagcagccagaggaaaaccagccccagaatgctgcaacttctcttctctctggacttcggtgtcctcggctctgaaggcgctctctgcacttagatgctgtcagccctcaacgtaggaggggccgtggggtccctaagtgattcttctccctggcaaggctcttccttttcagggatatctctgccaacccttcccctgtcctcgggttgggcttggccctctctgcctgagagagctcagcacacacacagctcagacccacggacaggaccccgggacagaaccccgggagcactgccctaggagcctggaccccacgagctcagtcccagctctgcctctgactcgctgtgtaccctctgccaagtcatgcccattctctagttcttgcaaaactgcagtgtttggactagaaacgtattggcccctgctagccctgtgctccagcttccagctggagatggcagccgttatttgcggagcccaggctgactccggattcaacgttgctggggagagaaaagcagtatagactccaccttccaggatgtccatttcggggagaggagcaggtgggaccctcaagaaaatgacggagaacatcccagacagatgggactcaagcaggatgggtgctatatccaagaagccaagaagggagagtttcgtgcactgtggttaacaggagggccgcctggaggcagtggctgagccagaaagtaacacagagctcatgcttggagagatagagtcttggccatggctttcctgcaagaccactgacgagcagtcccatggtgataaagggcagcccggcgggtcccagcatctcgagaccctctgcagaagtattatcagagtagagctgacttccagtacccgggcagccagctctgtctccagggaggcctggcctggaggaggagtccactaacaggaaacacttctcaccccctcacacaggcccaggggagcccctggagggaaattccttggcaggggaacaggaaatgtggtcgcctctgccccactgccagcctgagtgggcaaggaagcaggtggatcccccagaaggaaccgcagctcgcgaggcacctctcctcgtccccacccacccccacatttgcacaccttccacagggtcaggatggagtagctgccttgcgaggtggtgagactcctgtctctggaggtctgcaagcactggtagtgatattgcagcagacaaggtctgggttgggcgtctgcaggaggagaccttgtgggacatctgaggacatccgcagattcttgtcagcctgtgaactaggccctgcctctgtcacctcattggtccatgaaggagcagccaggggtggtggaaggagcactgggctaggggtcaggggtcagagattctgtcctgctcctgggatgcactggctactcccttagtctactcccttcccctctctggtcctcagcttcctccatcatggaggagatgggatcatggattttctgggcataagtggctgttctgggagtcattccaaagagagaataaaactcctgatccaaaaaaaaaaaaaaaaaaaaa

SEQ ID NO: 1046 - protein, 394 aa, Homo sapien
MDLCHPEPAELSSGETEELQRIKWHRKQLLEDIQKLKDEIADVFAQIDCFESAEESRMAQKEKELCIGRKKFNMDPAKGIQYFIEHKLLTPDVQDIARFLYKGEGLNKTAIGTYLGERDPINLQVLQAFVDCHEFANLNLVQALRQFLWSFRLPGEAQKIDRMMEAFATRYCLCNPGVFQSTDTCYVLSFSIIMLNTSLHNPNVRDRPPFERFVSMNRGINNGSDLPEDQLRNLFDSIKSEPFSIPEDDGNDLTHTFFNPDREGWLLKLGGRVKTWKRRWFILTDNCLYYFEFTTDKEPRGIIPLENLSVQKVDDPKKPFCLELYNPSCRGQKIKACKTDGDGRVVEGKHESYRISATSAEERDQWIESIRASITRVPFYDLVSTRKKKIASKQ

SEQ ID NO: 1047 - DNA, 1077 bp, Homo sapien
gtgttttctgcgtgagaggaaaagatgctagaaccacaggagaatggcgtgattgacctaccagattatgagcatgtagaagatgaaacttttcctcctttcccacctccagcctctccagagagacaagatggtgaaggaactgagcctgatgaagagtcaggaaatggagcacctgttcctgtacctccaaagagaacagttaaaagaaatatacccaagctggatgctcagagattaatttcagagagaggacttccagccttaaggcatgtatttgataaggcaaaattcaaaggtaaaggtcatgaggctgaagacttgaagatgctaatcagacacatggagcactgggcacataggctattccctaaactgcagtttgaggattttattgacagagttgaatacctgggaagtaaaaaggaagttcagacctgtttaaaacgaattcgacttgatctccctattttacatgaagattttgttagcaataatgatgaagttgcggagaataatgaacatgatgtcacttctactgaattagatccctttctgacaaacttatctgaaagtgagatgtttgcttctgagttaagtagaagcctaacagaagagcaacaacgaagaattgagagaaataaacaactggccttggaaagaaggcaggcaaagctgctgagtaatagtcagaccctaggaaatgatatgttaatgaatacacccagggcacacacggttgaagaggttaatactgatgaggatcaaaaggaggagtcaaatggattaaacgaagacattctggacaatccatgtaatgatgctattgccaatactttaaatgaagaggaaacactgctggaccagtcttttaaaaatgtgcaacagcaacttgatgctacatccagaaatattactgaagctagataagtttccattaagagaaaatgtatctgttaagtcatcgtcctgcaagcttggcgttactatgtattttttcttcttggagtgaaaatccttagatagtaaaactgttatagattattgtttaaaaaaaaaaaaaaaaaaaaaaaaaaa

SEQ ID NO: 1048 - protein, 301 aa, Homo sapien
MLEPQENGVIDLPDYEHVEDETFPPFPPPASPERQDGEGTEPDEESGNGAPVPVPPKRTVKRNIPKLDAQRLISERGLPALRHVFDKAKFKGKGHEAEDLKMLIRHMEHWAHRLFPKLQFEDFIDRVEYLGSKKEVQTCLKRIRLDLPILHEDFVSNNDEVAENNEHDVTSTELDPFLTNLSESEMFASELSRSLTEEQQRRIERNKQLALERRQAKLLSNSQTLGNDMLMNTPRAHTVEEVNTDEDQKEESNGLNEDILDNPCNDAIANTLNEEETLLDQSFKNVQQQLDATSRNITEAR

SEQ ID NO: 1049 - DNA, 3808 bp, Homo sapien
cgctcggaaagttcagcatgcaggaagtttggggagagctcggcgattagcacagcgacccgggccagcgcagggcgagcgcaggcggcgagagcgcagggcggcgcggcgtcggtcccgggagcagaacccggctttttcttggagcgacgctgtctctagtcgctgatcccaaatgcaccggctcatctttgtctacactctaatctgcgcaaacttttgcagctgtcgggacacttctgcaaccccgcagagcgcatccatcaaagctttgcgcaacgccaacctcaggcgagatgagagcaatcacctcacagacttgtaccgaagagatgagaccatccaggtgaaaggaaacggctacgtgcagagtcctagattcccgaacagctaccccaggaacctgctcctgacatggcggcttcactctcaggagaatacacggatacagctagtgtttgacaatcagtttggattagaggaagcagaaaatgatatctgtaggtatgattttgtggaagttgaagatatatccgaaaccagtaccattattagaggacgatggtgtggacacaaggaagttcctccaaggataaaatcaagaacgaaccaaattaaaatcacattcaagtccgatgactactttgtggctaaacctggattcaagatttattattctttgctggaagatttccaacccgcagcagcttcagagaccaactgggaatctgtcacaagctctatttcaggggtatcctataactctccatcagtaacggatcccactctgattgcggatgctctggacaaaaaaattgcagaatttgatacagtggaagatctgctcaagtacttcaatccagagtcatggcaagaagatcttgagaatatgtatctggacacccctcggtatcgaggcaggtcataccatgaccggaagtcaaaagttgacctggataggctcaatgatgatgccaagcgttacagttgcactcccaggaattactcggtcaatataagagaagagctgaagttggccaatgtggtcttctttccacgttgcctcctcgtgcagcgctgtggaggaaattgtggctgtggaactgtcaactggaggtcctgcacatgcaattcagggaaaaccgtgaaaaagtatcatgaggtattacagtttgagcctggccacatcaagaggaggggtagagctaagaccatggctctagttgacatccagttggatcaccatgaacgatgtgattgtatctgcagctcaagaccacctcgataagagaatgtgcacatccttacattaagcctgaaagaacctttagtttaaggagggtgagataagagacccttttcctaccagcaaccaaacttactactagcctgcaatgcaatgaacacaagtggttgctgagtctcagccttgctttgttaatgccatggcaagtagaaaggtatatcatcaacttctatacctaagaatataggattgcatttaataatagtgtttgaggttatatatgcacaaacacacacagaaatatattcatgtctatgtgtatatagatcaaatgttttttttggtatatataaccaggtacaccagagcttacatatgtttgagttagactcttaaaatcctttgccaaaataagggatggtcaaatatatgaaacatgtctttagaaaatttaggagataaatttatttttaaattttgaaacacaaaacaattttgaatcttgctctcttaaagaaagcatcttgtatattaaaaatcaaaagatgaggctttcttacatatacatcttagttgattattaaaaaaggaaaaatatggtttccagagaaaaggccaatacctaagcattttttccatgagaagcactgcatacttacctatgtggactataataacctgtctccaaaaccatgccataataatataagtgctttagaaattaaatcattgtgttttttatgcattttgctgaggcatgcttattcatttaacacctatctcaaaaacttacttagaaggttttttattatagtcctacaaaagacaatgtataagctgtaacagaattttgaattgtttttctttgcaaaacccctccacaaaagcaaatcctttcaagaatggcatgggcattctgtatgaacctttccagatggtgttcagtgaaagatgtgggtagttgagaacttaaaaagtgaacattgaaacatcgacgtaactggaaattaggtgggatatttgataggatccatatctaataatggattcgaactctccaaactacaccaattaatttaatgtatcttgcttttgtgttcccgtctttttgaaatatagacatggatttataatggcattttatatttggcaggccatcatagattatttacaacctaaaagcttttgtgtatcaaaaaaatcacattttattaatgtaaatttctaatcgtatacttgctcactgttctgatttcctgtttctgaaccaagtaaaatcagtcctagaggctatggttcttaatctatggagcttgctttaagaagccagttgtcaattgtggtaacacaagtttggccctgctgtcctactgtttaatagaaaactgttttacattggttaatggtatttagagtaattttttctctctgcctcctttgtgtctgttttaaaggagactaactccaggagtaggaaatgattcatcatcctccaaagcaagaggcttaagagagaaacaccgaaattcagatagctcagggactgctaacagagaactacattttttcttattgccttgaaagttaaaaggaaagcagatttcttcagtgactttgtggtcctactaactacaaccagtttgggtgacagggctggtaaagtcccagtgttagatgagtgacctaaatatacttagatttctaagtatggtgctctcaggtccaagttcaactattcttaagcagtgcaattcttcccagttatttgagatgaaagatctctgcttattgaagatgtaccttctaaaactttcctaaaagtgtctgatgtttttactcaagaggggagtggtaaaattaaatactctattgttcaattctctaaaatcccagaacacaatcagaaatagctcaggcagacactaataattaagaacgctcttcctcttcataactgctttgcaagtttcctgtgaaaacatcagtttcctgtaccaaagtcaaaatgaacgttacatcactctaacctgaacagctcacaatgtagctgtaaatataaaaaatgagagtgttctacccagttttcaataaaccttccaggctgcaataaccagcaaggttttcagttaaagccctatctgcactttttatttattagctgaaatgtaagcaggcatattcactcacttttctttgcctttcctgagagttttattaaaacttctcccttggttacctgttatcttttgcacttctaacatgtagccaataaatctatttgatagccatcaaaggaataaaaagctggccgtacaaattacatttcaaaacaaaccctaataaatccacatttccgcatggctcattcacctggaataatgccttttattgaatatgttcttatagggcaaaacactttcataagtagagttttttatgttttttgtcatatcggtaacatgcagctttttcctctcatagcattttctatagcgaatgtaatatgcctcttatcttcatgaaaaataaatattgcttttgaacaaaaaaaaaaaaaaaaaa

SEQ ID NO: 1050 - protein, 370 aa, Homo sapien
MHRLIFVYTLICANFCSCRDTSATPQSASIKALRNANLRRDESNHLTDLYRRDETIQVKGNGYVQSPRFPNSYPRNLLLTWRLHSQENTRIQLVFDNQFGLEEAENDICRYDFVEVEDISETSTIIRGRWCGHKEVPPRIKSRTNQIKITFKSDDYFVAKPGFKIYYSLLEDFQPAAASETNWESVTSSISGVSYNSPSVTDPTLIADALDKKIAEFDTVEDLLKYFNPESWQEDLENMYLDTPRYRGRSYHDRKSKVDLDRLNDDAKRYSCTPRNYSVNIREELKLANVVFFPRCLLVQRCGGNCGCGTVNWRSCTCNSGKTVKKYHEVLQFEPGHIKRRGRAKTMALVDIQLDHHERCDCICSSRPPR

SEQ ID NO: 1051 - DNA, 3032 bp, Homo sapien
agtcgctgtttgggacgctgggtgtgcggtgttctgtctccgctcccgtttcgctgtcacagcccgttccttcccggagcccgggacaggctgggcgcgcgcccgtgtgagtgagcgggactcagggcagaagtgtcccctcactgcgtttttttttccttttatccaaagaacggggcagttagtacgcttgccttcctgtcgcccggttgggagcggggttggtgtgcggagtggttcgcctttttttctttagaacttgtgagcctttttttttttttttttttctttcctttttttaggctcagtgctgtccgggctggtttgcccggtccctgactaacggctttctgccccttctctcgccacccctgcccaaggtcgcccctctgccttcgcccctgtcccgggagggtgggaagctttgaccccgccctgcccactcgcgtctccgcagccgtagccgcgcctgtcccaatatgaatagggtcaacgacccacttatttttataagagatattaagcccggactgaaaaacttaaatgtcgtctttattgtcctggagataggacgcgtgaccaaaaccaaagacggccatgaagtgagatcgtgcaaagtagcagataaaacgggcagcatcactatttccgtgtgggatgagatcggaggtcttatacagccaggggatattattcggttgaccagagggtatgcatccatgtggaaaggatgtctgacactttatactggaaggggtggtgaacttcaaaaaattggggatctaggtgcggtgcaggcagccgcaatgcgagattccatacactactaccctggtaatgatctccaccctgacctggaggagccatcctctctaggggtgtaagattttgtatggtttattcagaagtgccaaatttcagtgaacccaacccagattatcgaggacagcagaacaaaggggcacagagtgaacagaagaataattccatgaatagtaatatgggtacaggtacatttggaccagtgggaaatggtgttcacactggccctgaatcaagggaacaccagttttcacatgctggcagaagcaatggccggggacttataaatccacaactacaaggaacagctagtaatcaaacagtgatgaccacaataagtaatggcagggaccctcggagagcctttaaaagatgacctatgctaaatactcatgtgtagtttttatactacatgccctacttgaacacttattgcacttttatttattgttaactgtgaaaagtacgtcctttattgggtttccttttatattcttggtttgttaagaagaatggtttgtttttatagcaaaactgttaagctgctcgagtctcctgttgaagaatgggaacactgaaaagtaggggcatttatttttagagtaaaaagattattggatagcctttaaaaaacctgcacccatttcatgggtgagttacttaagacatcagctttatagcctctatgagtctatcttctgtataagttttgtaatatttaacataaggcttaatgggagatgttcttttgtcttgtattcagatattgccaactaaagcaataaccatcaaaaaacacaagaacttgtcaatgctagcagtaatttttgagtgtttgtggctctcggaatgattgacttcgttcagtgactactattaagattttccaaggactgactcatcccaaatttttgttgtattaccaaaaaaacagattccttatcagaatttggaatagaatgtgatctctattgcaacaagtaattttaaaagaaagctacatttattttagagtagtgctcctaacatgtattatcaactttgtggattacattggaggaaaatttaaaactggggccttgaatatttattttttgaaactaccatgttaaatactgaagtataatttgggggagttataaagttatgataaacattcatctgattattttaaacaatagttgtggtagataaacatactggaggtgagtaaaattgaattcatatagtaacatgcagtctgaagtcctagttacttaataggtactcagcctggagtgaaaatcctgggtactgactttgagaggagtgagtgtgcatgttgtcaaagtttctgaacacagttcacatagccttattagcaaaagttttaagaaatggctctatcaaagaagcaattgcagctttattcagaaatataaaagtggaatttatgtacatgtcataagtggtacccacttcccctttttactgtagggtggataactcttaggatttaactctttgaatattatctcttgaataaagcatgtgttaatgttaacaaacctacgtaatttttgccctttcaatgacttacagtggagagccagtacatcttaactactgttgtagtgatggtatcaacctcatggttacttagctctgcatttgttgctttgttttttttccacttcaaatcacaaaataagtagattttgttttctgaaaactccatagcatttgaatacaaaaagttgtgccagattgtttgccctaattcactgtgtttaacaaatatttcagtacacactatgtattaggcactgtgtggaaagtgttaaggggtagacaagataccgaataatctccacaagtttatttgtggtctatagtacttttgtaactggggttacaaaaattatagaaatttttttcctttgttcatatgcatattcatgattataatttggctttgtttgtgattaatgttttcttaagattttcacattatagaatacctcaaaagaagttgtctaaggactgggatagagagtatgtttcataaaattgtagatgtttagaatttttaaaaaccctacaaattagtatatgattgttttatataagtaagataggagcaacactttaaattatttgtgggagaatacagcattaaaggtgattttaaaagaaaaaaaaaaaaaaaaaaaaaaaaaaaaaaaaaaaaa

SEQ ID NO: 1052 - protein, 134 aa, Homo sapien
MNRVNDPLIFIRDIKPGLKNLNVVFIVLEIGRVTKTKDGHEVRSCKVADKTGSITISVWDEIGGLIQPGDIIRLTRGYASMWKGCLTLYTGRGGELQKIGDLGAVQAAAMRDSIHYYPGNDLHPDLEEPSSLGV

SEQ ID NO: 1053 - DNA, 2022 bp, Homo sapien
attccccaacctgatagccctccgcgacgcattacgcaccgcggacagctggagaggccgaggcgctctcgctttgatttcggcgcctccgccctcgcggggagagattggctgcggccgcgggacggggtagtgagcgcgtcacttcctgccgctgccaggcgcgtcctcccgcgcgctatgacggccagcgcacagccgcgcgggcggcggccaggagtcggagtcggagtcgtggtgaccagctgcaagcatccgcgttgcgtcctcctggggaagaggaaaggctcggttggagctggcagtttccaactccctggaggtcatctggagttcggtgaaacctgggaagaatgtgctcaaagggaaacctgggaagaagcagctcttcacctgaaaaatgttcactttgcctcagttgtgaattctttcattgagaaggagaattaccattatgttactatattaatgaaaggagaagtggatgtgactcatgattcagaaccaaagaatgtagagcctgaaaaaaatgaaagttgggagtgggttccttgggaagaactacctcccctggaccagcttttctggggactgcgttgtttaaaagaacaaggctatgatccatttaaagaagatctgaaccatctggtgggatacaaaggaaatcatctctaggtggccgagaagatttgattttctttaaaaagacaagaataaggtctggttagggaatgaaaaatgtatacatttcggaacaactccattttatctaaaaaagttcttgtgattgccagtttatttgcagtctcttaatgtatcccccactctttcagccagtacttgagaaaatttttctgaaatatgtcattgaattgtattccagacacagaatacatgataaatactgatattatgggtaatctgctttccatatttacctatgatatttactgtgcagtttgtcattactagcttgcatggagtaggatgcagtcaaatttgccttagtgtttctgttcaaatagagacctgaattcaaatattgtagtttaggttcaaacagagtatggctgttgcaaaatttaccaaatttgttgattacctcttttattaaagaaatgttggggagagggtaatatattgtgacaatttttgcaacttacagggaataggacaggtcattagggtgtatttcccaggtttccaattgagaatctaaaccaagagaagtgagacaaaccatctaatatctgtatcatgctattaataggctgtgatgttgagtttctcacttactctttctgaggtccagggtccttatatgaagagattcatatatatgaagagattcgtctagagcagtggttgtcaaagtgtggtctgggggggcctcaagagcctttcaagggtattctaggtcaaagctgtttttataacactaagacattatttcactatttatagcttttccttttttttatttgagaaggagtcttgctctgttgcccacattggagtgcagtggcacgatctcagctcattgcagcctccgccacctgggttcaagcaattctcctacctcagcttcccgagtagctgggattataggcacccaccaccacacctggctaatttttgtatttttagtggagacggggtttcaccatgttggccaggctggtctggaactcctgagctcaagtgatctgcccatctcagcctcccaaagtgctgggattacaggtatgagccacaacgcccagccatcatttatctttttcactcattttttcatgagtatgcagaggagttttcaagaggctatctggtgtgatattgtaataggctgaatgcaaaagcagatacaagattccagctttcgtctgtcatcagacattgaagagatttggagaaatgtaaagcagcagtactcttctcactaatttttattgtggttagttagaaaaatggttatttttagtgggttttaatatgtgaaaaaaataaaattagctatttgcc

SEQ ID NO: 1054 - protein, 164 aa, Homo sapien [sequence omitted]

SEQ ID NO: 1055 - DNA, 1647 bp, Homo sapien
gcccgcccgcgccccgaccagcccggcctcgggcagccactcaccggtgtccccgtccgcgtccttcctccccgggtcccggccatggcgctgagtgaacccatcctgccgtccttctccactttcgccagcccgtgccgcgagcgcggcctgcaggagcgctggccgcgcgccgaacccgagtccggcggcaccgacgacgacctcaacagcgtgctggacttcatcctgtccatggggctggatggcctgggcgccgaggccgccccggagccgccgccgccgcccccgccgcctgcgttctattaccccgaacccggcgcgcccccgccctacagcgcccccgcgggtggcctggtgtctgagctgctgcgacccgagctggatgcgccgctggggcccgcactgcacggccgctttctgctggcgccgcccggccgcctggtcaaggccgagccccctgaagcggacggcggcggcggctacggctgcgcccccgggctgacccgtggaccgcgcggcctcaagcgcgagggcgccccgggcccggcggcttcgtgcatgcgaggtcccgggggccgccccccgccgccgcccgacacaccgccgctcagccccgacggccccgcgcgcctgcccgcgcccggtccgcgcgcctccttcccgccgcctttcggtggccctggtttcggcgcgcccgggcccggcctgcattacgcgccgcctgcgcccccagccttcggtctcttcgacgacgcggccgccgccgcggcagccctgggcctggcgccccccgccgcccgcggtctcctcacgccgcctgcgtccccgctggagctgctggaggccaagccaaagcgcggccgccgctcttggccccgcaaacgcaccgccactcacacctgcagctacgcgggctgcggcaagacctacaccaagagttcgcatctgaaggcgcatctgcgcacgcacacaggtgagaagccctaccactgcaactgggacggctgcggctggaagtttgcgcgctcagacgagctcacgcgccactaccgaaagcacacgggccaccggccattccagtgccatctgtgcgatcgtgccttttcgcgctccgatcacctggcgctgcacatgaaacggcacatgtagccgggacgcccccgcccacctgcggcgggccgtggcgggtcccacgcgccgggcgcggccccctcccaaactgtgactggtatttattggacccagagaaccgggccgggcacagcgtggctacagagggtctccctcgatgacgacgacgacgacgccaccaccccagcccccgtctgtgactgaaggcccggtgggaaaagaccacgatcctccttgacgagttttgtttttcaaaatggtgcaataatttaagtggcatcttctctcccaccgggtctacactagaggatcgaggcttgtgatgccttgtgagaaataagggccttaatttgtactgtctgcggcattttttataatattgtatatagtgactgacaaatattgtattactgtacatagagagacaggtgggcatttttgggctacctggttcgtttttataagattttgctgggttggttttttttttaattaaaaagttttgcatctttt

SEQ ID NO: 1056 - protein, 355 aa, Homo sapien
MALSEPILPSFSTFASPCRERGLQERWPRAEPESGGTDDDLNSVLDFILSMGLDGLGAEAAPEPPPPPPPPAFYYPEPGAPPPYSAPAGGLVSELLRPELDAPLGPALHGRFLLAPPGRLVKAEPPEADGGGGYGCAPGLTRGPRGLKREGAPGPAASCMRGPGGRPPPPPDTPPLSPDGPARLPAPGPRASFPPPFGGPGFGAPGPGLHYAPPAPPAFGLFDDAAAAAAALGLAPPAARGLLTPPASPLELLEAKPKRGRRSWPRKRTATHTCSYAGCGKTYTKSSHLKAHLRTHTGEKPYHCNWDGCGWKFARSDELTRHYRKHTGHRPFQCHLCDRAFSRSDHLALHMKRHM

SEQ ID NO: 1057 - DNA, 1700 bp, Homo sapien
cggaattggtgggttcttggtctcactgagttctagaatgaagctgcagaccctcgcagtgagtgttacagctcttaaggctctctgactgccacccctgcctgcctgcccggccctgcacaacatgcagccctccggcctcgagggtcccggcacgtttggtcggtggcctctgctgagtctgctgctcctgctgctgctgctccagcctgtaacctgtgcctacaccacgccaggcccccccagagccctcaccacgctgggcgcccccagagcccacaccatgccgggcacctacgctccctcgaccacactcagtagtcccagcacccagggcctgcaagagcaggcacgggccctgatgcgggacttcccgctcgtggacggccacaacgacctgcccctggtcctaaggcaggtttaccagaaagggctacaggatgttaacctgcgcaatttcagctacggccagaccagcctggacaggcttagagatggcctcgtgggcgcccagttctggtcagcctatgtgccatgccagacccaggaccgggatgccctgcgcctcaccctggagcagattgacctcatacgccgcatgtgtgcctcctattctgagctggagcttgtgacctcggctaaagctctgaacgacactcagaaattggcctgcctcatcggtgtagagggtggccactcgctggacaatagcctctccatcttacgtaccttctacatgctgggagtgcgctacctgacgctcacccacacctgcaacacaccctgggcagagagctccgctaagggcgtccactccttctacaacaacatcagcgggctgactgactttggtgagaaggtggtggcagaaatgaaccgcctgggcatgatggtagacttatcccatgtctcagatgctgtggcacggcgggccctggaagtgtcacaggcacctgtgatcttctcccactcggctgcccggggtgtgtgcaacagtgctcggaatgttcctgatgacatcctgcagcttctgaagaagaacggtggcgtcgtgatggtgtctttgtccatgggagtaatacagtgcaacccatcagccaatgtgtccactgtggcagatcacttcgaccacatcaaggctgtcattggatccaagttcatcgggattggtggagattatgatggggccggcaaattccctcaggggctggaagacgtgtccacatacccggtcctgatagaggagttgctgagtcgtggctggagtgaggaagagcttcagggtgtccttcgtggaaacctgctgcgggtcttcagacaagtggaaaaggtacaggaagaaaacaaatggcaaagccccttggaggacaagttcccggatgagcagctgagcagttcctgccactccgacctctcacgtctgcgtcagagacagagtctgacttcaggccaggaactcactgagattcccatacactggacagccaagttaccagccaagtggtcagtctcagagtcctccccccacatggccccagtccttgcagttgtggccaccttcccagtccttattctgtggctctgatgacccagttagtcctgccagatgtcactgtagcaagccacagacaccccacaaagttcccctgttgtgcaggcacaaatatttcttgaaataaatgttttggacatagaaaaaa

SEQ ID NO: 1058 - protein, 486 aa, Homo sapien
MQPSGLEGPGTFGRWPLLSLLLLLLLLQPVTCAYTTPGPPRALTTLGAPRAHTMPGTYAPSTTLSSPSTQGLQEQARALMRDFPLVDGHNDLPLVLRQVYQKGLQDVNLRNFSYGQTSLDRLRDGLVGAQFWSAYVPCQTQDRDALRLTLEQIDLIRRMCASYSELELVTSAKALNDTQKLACLIGVEGGHSLDNSLSILRTFYMLGVRYLTLTHTCNTPWAESSAKGVHSFYNNISGLTDFGEKVVAEMNRLGMMVDLSHVSDAVARRALEVSQAPVIFSHSAARGVCNSARNVPDDILQLLKKNGGVVMVSLSMGVIQCNPSANVSTVADHFDHIKAVIGSKFIGIGGDYDGAGKFPQGLEDVSTYPVLIEELLSRGWSEEELQGVLRGNLLRVFRQVEKVQEENKWQSPLEDKFPDEQLSSSCHSDLSRLRQRQSLTSGQELTEIPIHWTAKLPAKWSVSESSPHMAPVLAVVATFPVLILWL

SEQ ID NO: 1059 - DNA, 2555 bp, Homo sapien
tattttgtcagatgtgttgaacctcgattaagattgcattatgacattcttgaagaccgagttccatcaggacttattgttgactaccacaatctgttgtctcaatgtgaggagagttacaggaaatttttaaatctgagaagcagtttgtcaaattgtaactctgactccgagcaggaaaatatctccatggtggaagggttaaaattgtattcggagatggaacagttgaaacaaaagctgaaactcattgagaatcctttgttgaggtatgtgtttggttatcagaagaattctaacatccaagcaaagggtgtccgttccagcggtcagaagatcactcatgtggtctcctccaccatgatggctggtctcctgcggtccctgcttacggacaggctttgccaggagcctggtgaggaagaaagagaaattcagttccatagtgatccattgtctgctataaatgcctgcttcgaaggtgacactgttattgtttgtcctggccattatgtggtacatggcactttctccattgctgactccattgagttggaaggatatggcctaccagatgacattgtgatagaaaagaggggcaaaggcgacacttttgtggactgcactggtgctgatattaaaatctcaggcataagatttgttcagcatgatgctgtagagggaatcttaattgctcaccgtggtaagactacgctggaaaactgtgtgctgcagtgtgagacgaccggagtcacagtgcggacatcagcagagtttctaatgaagaactcggatttatatggcgccaagggtgctggtatagaaatctaccctgggagtcagtgcaccctgagtgacaatgggatccatcactgcaaggaagggatcctcattaaggacttcttagatgaacattatgacattcccaagatatccatggtgaataatataatacataataatgaaggttatggtgttgtcttggtgaaacctacaatcttctctgacctgcaagaaaatgctgaagatggaactgaagaaaataaagcgcttaaaattcagacaagtggagagccagatgtggctgaaagagtggatctagaagagctgattgagtgtgcaactggtaaaatggagctttgtgcaagaactgacccttctgagcaagtcgagggaaattgtgaaattgtaaatgaactaattgctgcctccacacagaaaggccagataaagaagaaaaggttgagtgaactggggatcacgcaagctgatgacaacttaatgtcacaggagatgtttgttgggattgtggggaaccagttcaagtggaatgggaaaggtagttttggcacatttcttttctgactacagtgatgtaagtagatagcaaaatactggattttgcacatgctgccctaagaatcactgctgccattgtagtttgctgtattgtctgtattttatatttgattatttgggcttgagtgaaaggtagatttatttccatttgcaggtgttgcacataaaacactccctctttataagaaaaatcataaatgcatataaaatagaaaatatttggagattgcttatctgaaagtcttgctttcttatacacatggttctctcatattaagcctggtggttactttttagtgtaattacctttagcacttcaaagacgaggaagtaaggaagggaatgcaagactagtgcataaaaatgcaataggtgtcatatgtacagcattcttcttagagttgccttttcatcccaattacagtgagtctgatttccatcctgtatttgcataatacttgtcttaaaataaaagcttttatgattgggaatttatctgcctaatcagacttattattgagacgtcaatgggacgcatttttctgttgagctatgcagtcgtcaaaacagcgatagacagcataggaggtttgaagcagaaatgaaatgtgttattcagagccaatgttgtacatagagcattttcactattgctgaatgggaatgattaaaaacaaggtatttttcgggccaggcggtggctcacgcttgtaatcgcagcactttgggaggctgaggcaggaggatcacttgagcccaggagttcaagactagcctaggcaacatagtgagaccctgtctctactaaaaataaatttaaaaaaaattagctgagtgtggtggtgcatgcatgtagttccagctactcaggaggctgaggctagaggatccttgagcccaggaggttgaggctgcagtgaggtgtgattgcgccactgcattccagcttgggcgacagagcgagacccagtctcaaaaaaaaaaaaaaagtatttttctcttaccgttacagtattctgattatattactgacacagtcaaaatgattaactgtacaacctgtatctgctgggtgttcttgttatcatattgtaaaacagctttaaaaatatttatattttaaaaactgtatgtgacattaatatgcctaatgattaaaattatagtgatgaaataaaaaaaaaaaaaaaaaaaaa

SEQ ID NO: 1060 - protein, 391 aa, Homo sapien
MVEGLKLYSEMEQLKQKLKLIENPLLRYVFGYQKNSNIQAKGVRSSGQKITHVVSSTMMAGLLRSLLTDRLCQEPGEEEREIQFHSDPLSAINACFEGDTVIVCPGHYVVHGTFSIADSIELEGYGLPDDIVIEKRGKGDTFVDCTGADIKISGIRFVQHDAVEGILIAHRGKTTLENCVLQCETTGVTVRTSAEFLMKNSDLYGAKGAGIEIYPGSQCTLSDNGIHHCKEGILIKDFLDEHYDIPKISMVNNIIHNNEGYGVVLVKPTIFSDLQENAEDGTEENKALKIQTSGEPDVAERVDLEELIECATGKMELCARTDPSEQVEGNCEIVNELIAASTQKGQIKKKRLSELGITQADDNLMSQEMFVGIVGNQFKWNGKGSFGTFLF

SEQ ID NO: 1061 - DNA, 3941 bp, Homo sapien
  Unsure 3939: Unknown base
ttgggaaacccctacctgtctgtacctgtaggtcttttctctggggtctggaagaagaatccttcaatatcttgccttctggtaatctgagagcagggcgagaaaaggaagatcagagttccacccttaaatctgtaggttttcactcccccactctcctttgcagtcccgtggagtctccatctgagccctttcctagtccaggcatcccgatgttggtggatggcccatctgagcggccagccctgtgcttcttgctgttggctgtggcaatgtctttcttcggctcagctctatccatagatgaaacacgggcgcatctgttgttgaaagaaaagatgatgcggctcggggggcggctggtgctgaacaccaaggaggagctggccaatgagaggctcatgacgctcaaaatcgctgagatgaaggaggccatgaggaccctgatattcccacccagcatgcactttttccaggccaagcatctcattgagagaagtcaagtgtttaatattctaaggatgatgccaaaaggggctgccttgcacctccatgacattggcatcgtgactatggactggctggtgaggaatgtcacctacaggcctcactgccacatctgtttcaccccaagggggatcatgcagttcagatttgctcacccaactccccgtccatcagaaaaatgttccaagtggattctgctggaggattatcggaagcgggtgcagaacgtcactgagtttgatgacagcttgctgaggaatttcactctggtgacccagcacccggaggtgatttacacaaaccaaaatgttgtctggtcgaaatttgaaaccatcttcttcaccatctctggtctcatccattacgcaccagtgttcagagactatgtcttccggagcatgcaggagttctacgaggacaacgtgctctacatggagatcagagccaggctgctgccggtgtatgagctcagtggagagcaccatgacgaagagtggtcagtgaagacttaccaggaagtagctcagaagtttgtggaaactcaccctgagtttattggaatcaaaatcatttattcggatcacagatccaaagatgtggctgtcatcgcagaatccatccgaatggccatggggctccgaatcaagttccccacggtggtggcagggtttgacctggtggggcatgaggacactggccactccttgcgtgactacaaggaagctctgatgatccccgccaaggatggcgttaagctgccttacttcttccacgccggagaaacagactggcagggtacttccatagacaggaacattctggatgctctgatgctgaacactaccagaatcggccatggatttgctttgagcaaacaccccgcagtcaggacttactcctggaaaaaggacatccccatagaagtctgtcccatctctaaccaggtgctgaaactggtgtctgacttgaggaaccaccctgtagccactctgatggccactgggcaccccatggtgatcagctctgatgacccagctatgtttggtgccaaaggcttgtcctatgatttctatgaggtcttcatgggcattggggggatgaaggctgacctgaggaccctcaaacagctggccatgaactctatcaagtacagtaccctgttggagagtgagaaaaatactttcatggaaatctggaagaagagatgggataagttcatagcagatgtggctacaaagtgaggagaagctagccagccctctacaagctgtcttcttgcacacgctgtcacttcctctcactcgttcttgaatcagctccatgtgcccatgaaatcaatggcctctgtatggagcgaccctgtgagaagcacttggctggctgagcaaattcatcctctggaaatattctctctcagccacagtgacattgaccctcttggttttctcctctctctggccatttcttccagtttccctatttcagagtcttctcctctctctgatctctgtgctgtttcctcaggactcagtcctgggctctcttctattctggtctctttatttttttatttttgtattttttcgagatggagttttgctcttgttgcccaggctggagtacaatggtgcgatctcagctcagtgcaacctccgccacccgggttcaggcaattctcttgcatcagcctcccgagtagttggaattataggcatgtgccaccacacccagctgatttttgcatttttagtagagacaggttttcaccatgttggcgagctggtatccaactcttgacctcaggtgatccactcgccccttggctcccaaagtgctggaattacaggcgttagccaccatgcctggcctattctggtctctttaactctctcctctttatttctcttctctctctgtacacttttcctgggtggtctcatccattcctttgctttttcataccatttatttgttaatgattcccacatttatttatgcacttggagagctcacaggaatctcagaaactgatgaggtacaattctgaaccctcagtctcttccctttaaacctttctttttctctactttaatttttctaaagagtgtcttgctatgttgcccaggctggtctccaactcaagtgatcctcctgccgcagtctcccgaagtgctgggattactgacatgagccaccacactcagccctttaaacctttccctggcctttcccatagctggtgaaggacacctccatccattccacgcagttgctcaaagcagaaattttcagtgcaagtcttgatgctgcgccgtcccccactccctacatcagaacgcatccctcatctggactccagcggtggcttcttgatgctgcgcggtcccccactccctacatcagaatgcatcccgcatccagactccagcggtggtgctctacctgcacgctgttgccaagtccaagctaccatactcctgcctgagctatgacaacagcctcctcactgatctcccctttcttccctttgcctcctccagctcatttttcacagtgtagaatgacattttgtttgtttgttttgttttgtttgagatggagtctcgttctgttgcccagggtggagtgcagcggtgcgatctcggctcactgcaacttccactcccgggttcaagcggattctcgtgcctcagcctcctgagtagctgggattacaggcatgcaccaccatgcccggataatttttgtatttttagtagagatggggtttcactatgttggccaggctggtctcgaacacctgacttcgtggtccacccgccttcggcctcccaaagcactgggattacaggcgtgagccacccggcctggcctagaatgacttttaaaagatcaaattaaatcaggtcactcctttgcttacaacgcagtgcgtttagaggtacaccccatgtctccacagggcatacagcatccgatttaatctggatccattccggcgcttcctctcccagtcacccagagggccccaaccccggcggccctttcttcctcaaatgtcctcggctctataccgtgcctgggtcttttctctttctctctgcctggaacattccttctttccccttttgtcttgcccactcctgtttacccttcaagtttcaagttcatgtcactgtctcagagaggttttcctgtgctcgccctgtttctctcaggaagccttgctcttttccatcatgcctctaatcacagcttataatcggatatttatttctgtgtctacagtcttgccctgccagactgtaagccccatgtgggcaggcgctcatgattgtttctgattgtttcacgcatgctgctaacccagagcctgggcccaaagctagttagtactcaataaacaatgcattgaaaaaaaaaaaaaaaaanta

SEQ ID NO: 1062 - protein, 511 aa, Homo sapien [sequence omitted]

SEQ ID NO: 1063 - DNA, 792 bp, Homo sapien
ccaagctccagctgtttgtcaaggcgagtgaggacggggagagcgtgggtcactgcccctcctgccagcggtcttcatggtcctgctcctcaagggcgtacctttcaccctcaccacggtggacacgcgcaggtccccggacgtgctgaaggacttcgcccccggctcgcagctgcccatcctgctctatgacagcgacgccaagacagacacgctgcagatcgaggactttctggaggagacgctggggccgcccgacttccccagcctggcgcctcgttacagggagtccaacaccgccggcaacgacgttttccacaagttctccgcgttcatcaagaacccggtgcccgcgcaggacgaagccctgtaccagcagctgctgcgcgccctcgccaggctggacagctacctgcgcgcgcccctggagcacgagctggcgggggagccgcagctgcgcgagtcccgccgccgcttcctggacggcgacaggctcacgctggccgactgcagcctcctgcccaagctgcacatcgtcgacacggtgtgcgcgcacttccgccaggcgcccatccccgcggagctgcgcggcgtacgccgctacctggacagcgcgatgcaggagaaagagttcaaatacacgtgtccgcacagcgccgagatcctggcggcctaccggcccgccgtgcacccccgctagcgccccaccccgcgtctgtcgcccaataaaggcatctttgtcgggaaaaaaaaaaaaaaaaaaaaaaaaaaaaaaaaaaaaaaaaaaaaaaa

SEQ ID NO: 1064 - protein, 207 aa, Homo sapien
MVLLLKGVPFTLTTVDTRRSPDVLKDFAPGSQLPILLYDSDAKTDTLQIEDFLEETLGPPDFPSLAPRYRESNTAGNDVFHKFSAFIKNPVPAQDEALYQQLLRALARLDSYLRAPLEHELAGEPQLRESRRRFLDGDRLTLADCSLLPKLHIVDTVCAHFRQAPIPAELRGVRRYLDSAMQEKEFKYTCPHSAEILAAYRPAVHPR

SEQ ID NO: 1065 - DNA, 1414 bp, Homo sapien
ggcacgaggcacctcgctcgcagcctccccagcgcagcagcccggctgtgggcctgcggcagccgggtcttcctggtccccacctcctggggccgacgggcggcaggaaggggctcggcgggacgcgccgtcagggacctgaggaggaacaacggaacgcgttcggaacggcctggactcccgagactcacccgactcgtggccacaccgggagaactgaagcggcagtagccggcggagacgcccgacccgaaggccggctgctagggagcagacagctgaaccgcttgccagacgccgaaacccagtgacgccctccaccgctccaccgtgctcccggctccccgcccccgccgcccgcgggccccaaggcgcatgcgccgcctgtcctggaggggcccatttccgtccgtcgtggggggaggcacagtgagtccactggggcacggcagcgtctaagccacaagccgagcacataagccaggtcctaacggagcctatgtgtaagtccactactggtgcaaggttgcacacttctaagaagagcggcgtggggggctcggcgaccttcgcttcagtcgctcccccgtgcagtcccctgtgcccaagacacagcctgatgcttgtgctccggtgggcggagcttggaggcggcgggaactgcaattggtggctttgaaggcgcggcgagcgggaacagctcttgaggagtgagactgcaggagatgtgggccgtgccaaagagatggatgagactgttgctgagttcatcaagaggaccatcttgaaaatccccatgaatgaactgacaacaatcctgaaggcctgggattttttgtctgaaaatcaactgcagactgtaaatttccgacagagaaaggaatctgtagttcagcacttgatccatctgtgtgaggaaaagcgtgcaagtatcagtgatgctgccctgttagacatcatttatatgcaatttcatcagcaccagaaagtttgggatgtttttcagatgagtaaaggaccaggtgaagatgttgacctttttgatatgaaacaatttaaaaattcgttcaagaaaattcttcagagagcattaaaaaatgtgacagtcagcttcagagaaactgaggagaatgcagtctggattcgaattgcctggggaacacagtacacaaagccaaaccagtacaaacctacctacgtggtgtactactcccagactccgtacgccttcacgtcctcctccatgctgaggcgcaatacaccgcttctgggtcaggagttagaagctactgggaaaatctacctccgacaagaggagatcattttagatattaccgaaatgaagaaagcttgcaattagtgaacatgaaaggaaaataaaaattcctcacagtcaaaaaaaaaaaaaaaaaaa

SEQ ID NO: 1066 - protein, 204 aa, Homo sapien
MDETVAEFIKRTILKIPMNELTTILKAWDFLSENQLQTVNFRQRKESVVQHLIHLCEEKRASISDAALLDIIYMQFHQHQKVWDVFQMSKGPGEDVDLFDMKQFKNSFKKILQRALKNVTVSFRETEENAVWIRIAWGTQYTKPNQYKPTYVVYYSQTPYAFTSSSMLRRNTPLLGQELEATGKIYLRQEEIILDITEMKKACN

SEQ ID NO: 1067 - DNA, 2840 bp, Homo sapien
gtttttgtgcaggaacagcccctcccgtctttgtcctggcggtgagcacccagggctaagcttttgaacactttctttgtgtttggattcagcccaggcaatgcatatttgctttcatttcttcttgagcttgaggagctcctgggtgcaaatcttggaaaatgaggatctctgagcctttccaggccagctctttgttttgtagcagacaattgaggctttgaaaaggaaagtgggtgggggcaccccacaggtggccctcatcacccaattgccagtgcctgcaggctgcttcagcagaggcccagagtcaaagaggacttaaaaccagctgtcgtttctcccttagcttctgtgtatgagagaaacgacttctgtttttcaaagtaagaacaaggaggaatttgtttctaaaagaacattaaaacacaggctcgtggtctaaaagcaaatggttcagcaggatgttcagggccttaaagcacagtcagcaggactcagcatctcccagcacctgctctccggttgtcatggtaacatcatccccaacccaaccaccttgtccagccgagagacagcaatcataaggagggacctcggtttcccccgaggatcctgggcttcctttctgaaacgcttgcttctgagctcagcaaccaggaacaccaggccagcccatccccagcacctctgtggagatgagggacaaagtcctacagtccctcttcctgttctgatgagaaagggagggaagaaaacataccccgagcgcctgcaatatggtcatgacactttcaaaaagcctgtgctatggagtcatgatcagaaaccagagtgtggagagggtcagcagcctgcctcagagcagccagctaggcggggagtggtaaatttgggacttgtacccaggcatgactggctccgagcccagtgctccactctatggaatgttccctgggcctcagttgctttcctttcctttgcaggccgcgggctgctgccactctggcagctggtgagttagctggagggcaacattccaaagcaggggcagcatgctgctttcctcctgtgcccactcctgcggggaagtccgttgactcccaccgctgaagggagctggcaacaccaggatgaggtcccaggggacgggagcaggtacccactgtctgtctaccttcccactggaaaagcacggacaggccagcccttgcgggggcaggcagaggacagagttggctttgcgcggtctctgcctgctgagcagttccaattcctctcatgggagaaacaaggaggcagtcgcttgtgcatgttccagaagttttactggggaggaggaagcggacagaggaagctgtgtgtgcatgtgaaggggtgggcagggtgggagggatgcacgcgtatgtgagcatagcatgtgtgagtactacacacatctccatgcagaagcacaactgggcagccctggcttccagctctgggcttcagcacaacagacaccagcctgtggtctctcagaagccagggagaccacatcgggctcaggacgttttacccaaagtccagagtttttatgcctctccctggcattctccataaagaagggaaggtcagatgaccccttagatctgtgtcatctgggaatttccttgggctggtttagacacgatgccctctttttctcaggatagcagataacctgctttgaaagagggcttaattctgtgggtcctaaattttctcctttctctctctctttctgtgtgtgtgtgttgggaaaatggcaagtttccaataccagctttggaggaacgattacgttttccctccaatttcaagtccgaaagaccagagccctcattccaaagccccccacccagatggattttttcgtttcatttgtcatccgtcccatgggagggccccatgtctcctcagaacccatcctggaggcagcaggtcgggtagagtgagtttggcctgctcatgacctccacccctgagattgtgaacaaggatgtctggggcgatgctgagaatgtttttgaagctgctcccagatgacgctgatgatcacaccagattgagtgctgcgatcgccttgagtccagcctctgcataaacgaggttctcataaacaagttcactctaccctaagctaagtctatgtgagcaaacccacttcatcctttgtacctggagacctggttacactaacctgatactgacctgttcatgtagctggaatggtgtgtttcatgcagtgtggaccaagcaatggcatggggtgtgtgtgtgtgtgtgtgtgtgtctgtgtgtgtgtgtttgtgtatgcgttcacacttgtgtgtgtatatgtgcatgtagatgctgcataaatgatttttgatgtcaaagacaaacacattccattgttttaaatattctattatgtaaacaatacgcagagggaccatatctactcttgtcatattatttgtgatggtaaaacatgcatttgcaataaattaagctttctgggaaggcaagcagtattggagccaaacgactgtctcggaacatgtgtgtgttatctcggttcatatcaagtccaaagctaatggagccttccccgccatccagggaggaacaccaggaccccggagtttcttcttagtgctatattttaaagttgcattgacgttttcctccccttccttttgtgcaagttggaagtagcagtgttctaaaagatggtttgacgtttttgctgttgttttatgtttttaaaaatgtatctgctttgtgtttggaaataaaaatctctattttggtctatgaaaaaaaaaaaaaaaaaa

SEQ ID NO: 1068 - protein, 190 aa, Homo sapien
MVQQDVQGLKAQSAGLSISQHLLSGCHGNIIPNPTTLSSRETAIIRRDLGFPRGSWASFLKRLLLSSATRNTRPAHPQHLCGDEGQSPTVPLPVLMRKGGKKTYPERLQYGHDTFKKPVLWSHDQKPECGEGQQPASEQPARRGVVNLGLVPRHDWLRAQCSTLWNVPWASVAFLSFAGRGLLPLWQLVS

SEQ ID NO: 1069 - DNA, 3438 bp, Homo sapien
gccgcggagaaggagccggaccccttgggcggagcgcccaatgtgtggtccctcacgccgtcccgcaccttgctttttagggttctttttccgctttctgagcccttttataccttacgtttagaaggggaaaatcatcctcccacaccttctccccgactttttgccttttttgtcttgaagttacccaaaggcctgtgtattgttctcaatggtcccaagaattactctaatatagttgtttttctgagggaggatggatggagataactatcctgatcccaatgtcactttttaaggcattcgcttcaagagacaagcagtttagaatcaggcagaactggattgcaaaatttatgggcagaccgagaaaatgctgctgtgaagacccaattaaagctttcacataaatgaagctacagctatcatgatttagtgcccccaaaaggaagaacttcagtggacaagaaaggacatttctgggggtagtagaatgcttgaggcctggaatttaaacctgagccactatctgaaggtttaatatatctttgccaagtccaagggtacaaagattttctcctgtgttttcttctagaagttttatcatttgatagtctgtgatccatttcaagttgatttgctatctggtgtgagctattaaataatagaagaaaatggaattgaatatgatgtcagcatggaacaatctaatgattcattaagagtcaaccataatgacggtgaagagtcaaaaaccagtgctcaagtatttgagcatctaatctgtatggactccagggattcttcctttggacaaaatgattctcctacagttttgcccatcactactcgtgaagcaaataattcactcatatcacagaatataccagggcccctgactcagacacagactctttctgcagagcaattccatctagtggaccaaaatgggcaggctattcaatatgaacttcagtcattgggggaatccaatgcacaaatgatgatcgttgccagcccaacagaaaatggacaggtacttcgtgtaattccacctacccagacaggaatggcacaagtgattatacctcaggggcaacttgtggatgtgaatagtcctcgggatgtccctgaagagaaacccagtaacagaaacttaccaactgtaagagtggatactctagcagacaataccagcaattacattcttcatcctcaaacatccttcccattgcccaaaaagtcagtgaccggaatgctggaagaaccccttctggggcctcttcagccactttcttctaatacacctatatgggcctgccgtcttaggagctgtgagaaaattggagattcataccgtggctactgtgtaagtgagactgaattagaaagtgtcctaacatttcacaagcagcaaacacagagtgtttgggggacccgtcagtctccaagcccagccaagcctgctacacgcttgatgtggaaatcccagtatgttccatatgatggaatcccatttgttaatgcagggagtagagctgtggtaatggagtgtcagtatgggccaagaagaaaaggtttccagttaaaaaaagtcagtgagcaggaaagcaggtcttgtcagctctacaaagccacttgtccagctcggatttacattaaaaaggtacagaagtttcctgaatatagagttcctacagaccccaaaattgacaagaaaattatcagaatggagcaggagaaagcttttaacatgctaaagaagaacttggtagatgctggtggtgttcttaggtggtatgtacagttacctacacagcaagctcatcagtatcatgaattagagactccctgcctcactttgtcaccttctccttttcctgtgtcttctcttgaagaagaggaaactgcagttagagatgagaattgtgcattaccctcacgtttacatcctcaagtagcacataagattcaagaattagtatcacagggaatagaacaagtgtatgcagtaaggaaacagctaagaaaatttgtggaaagggaactgttcaaacccgatgaggtacctgaaagacataatttatctttttttccaactgtaaatgatataaaaaatcacatccatgaggtacagaaatccttgagaaatggagatacggtatataactcagagattattccagcaacgcttcaatggactacagacagtgggaatattctcaaagagaccatgacagttacatttgcagaaggaaattcaccaggagaatcaattaccaccaaagtggaaacaaatcagaccaggggttctttgtctcctgagccaacccacttgctctcctcactctcctcatttcagcccaaaatatttacacaactacagggtttgcagttacaaccaaggtacacctctcctgatgaatcaccagctgtggtatcagtaaataaccagccgtcctctagtccttcaggacttctggatacaataggaagtgctgtaatgaataataattctctactgcttggtcaaagtcatagccttcaaagagatacatgcttaacccaaaacaatagtactgcctccaccatgggtaaccttccagaaccagatcaaaatctagttgcaatggacgagctggtagaagttggagatgttgaggatacagggaatctggaaggaactgttcatcggattctgttgggagatgtgcagactattccaatacagattatagacaaccactcagctcttattgaagaaaatccagaaagtaccatttctgtgagccaagttaaacaagaacccaaagaaccagcattgtctatggaagcaaaaaactgtggactataagaaattatctgctacataaattattgaagcttttcagaatttacaactctggtgacttctgatgtcttagaaaggaaggtgaatatagtcaaagcgtggcattgagataattggactgaagaccagtttgatgagaagcttttatttaaaactgatatatttgttgccagttccatatttttaccttccttaagagatgttttactcttcttattttgtataatttttatgctctttgattatctaataaggccagtatttcaaaagctgttctgaatttatccacagtaatatagtctgaacacaaatagtttacttaacttatccttggaaatattcaattttggttattacaaaacagaaaagaacaacagcaacaaaaacattgtgtgaatatatgtttgtatgtgtgtatgtatatcatgaattttttttttaagttctgaaaaagaacttgttctctccttaaagttgtgaagaaattgttaattgccagacaggtaagaaaatgtttataatctatctcattaagaaagatgaagtattagattttacatcataacacaaagtccagcagctacatc

SEQ ID NO: 1070 - protein, 718 aa, Homo sapien
MEQSNDSLRVNHNDGEESKTSAQVFEHLICMDSRDSSFGQNDSPTVLPITTREANNSLISQNIPGPLTQTQTLSAEQFHLVDQNGQAIQYELQSLGESNAQMMIVASPTENGQVLRVIPPTQTGMAQVIIPQGQLVDVNSPRDVPEEKPSNRNLPTVRVDTLADNTSNYILHPQTSFPLPKKSVTGMLEEPLLGPLQPLSSNTPIWACRLRSCEKIGDSYRGYCVSETELESVLTFHKQQTQSVWGTRQSPSPAKPATRLMWKSQYVPYDGIPFVNAGSRAVVMECQYGPRRKGFQLKKVSEQESRSCQLYKATCPARIYIKKVQKFPEYRVPTDPKIDKKIIRMEQEKAFNMLKKNLVDAGGVLRWYVQLPTQQAHQYHELETPCLTLSPSPFPVSSLEEEETAVRDENCALPSRLHPQVAHKIQELVSQGIEQVYAVRKQLRKFVERELFKPDEVPERHNLSFFPTVNDIKNHIHEVQKSLRNGDTVYNSEIIPATLQWTTDSGNILKETMTVTFAEGNSPGESITTKVETNQTRGSLSPEPTHLLSSLSSFQPKIFTQLQGLQLQPRYTSPDESPAVVSVNNQPSSSPSGLLDTIGSAVMNNNSLLLGQSHSLQRDTCLTQNNSTASTMGNLPEPDQNLVAMDELVEVGDVEDTGNLEGTVHRILLGDVQTIPIQIIDNHSALIEENPESTISVSQVKQEPKEPALSMEAKNCGL

SEQ ID NO: 1071 - DNA, 3246 bp, Homo sapien; identical to SEQ ID NO: 642
  Unsure 2530: Unknown base

SEQ ID NO: 1072 - protein, 460 aa, Homo sapien; identical to SEQ ID NO: 643

SEQ ID NO: 1073 - DNA, 2558 bp, Homo sapien
  Unsure 360: Unknown base
gaattccggctcccgcggctgcaggcgcgcgcctagagtgcctggcgggctccggcttccgcgtccgccccggccccggtccagacttagtcttcagctccgcgcccgctccgccgcggcccaccgcgcccgccggcagccgagcccccagcgacgcccgcacagctccgggtgcccagacagggggccatgccgtgccggagggaggaggaagaggaagccggcgaggaggcggagggggaggaagaggaggaggacagcttcctcctactgcagcagtcagtggcgctgggcagctcgggcgaggtggaccggctggtggcccagatcggcgagacgctgcagctggacgcggcgcangacagcccggcctcgccgtgcgggcccccgggggcgccgctgcgggccccggggcccctggctgcggcggtgccggcggacaaggccaggtccccggcggtgccgctgctgctgccgcccgcgttggcggagactgtgggcccggcgccccctggggtcctgcgctgcgccctgggggaccgcggccgcgtgcggggccgcgctgcgccctactgcgtggccgagctcgccacaggccccagcgcgctgtccccactgccccctcaggccgaccttgatgggcctccgggagctggcaagcagggcatcccgcagccgctgtcgggtccgtgccggcgaggatggctccggggcgccgccgcctcccgccgcctgcagcagcgacgcgggtcccaaccagaaacccgcacaggcgacgacgacccgcaccggcttctgcagcagctagtgctctctggaaacctcatcaaggaggccgtgcgaaggcttcattcgcgacggctgcagttacgtgcaaagcttccccaacgcccgctcctgggacctctgtcggccccggtgcatgaacccccttcgcctcgcagccctcgcgcggcctgcagtgaccctggcgcctccgggagggcgcagctcagaactggcgacggcgttcttgtgcctggcagctaacacgcccggggtggccacagcgccagcctcagactggagggcaaggggttcccttgagggctgcagttctactcaggctggtggagaactctggcttttggaagcgagagtaaaaagctaatgacgaggaaccgaaaaatcgcgagtgtttcgcgggtaactggggttgagggccaaaatatttggaatgaaggacttggccctatttaaggcagattttacagagcgcacctcaaacgtacaagtcagtaggactccttatttggcgtgacccgacctggccgcggagcctgcatttcctcgcagcctctcagtgccctccagccccgcgaccatgtggccacaatccacgcttctccggatcgcggtgcgccggaaccacggaggatgatgccagttacttgctttaccttttcagggctggctcctgatccactttgggggaggagaacatgagtagataatttcagggtgcagcccaatctgccagacttaaaaaaaccatcttgtgtctttggaggtgctgcttaatatcaaacatgcggtgccatgaagggaccctttgggggttgaataggagttaacccctgcgctctctttgcaactgtctctcttctcagagtggtgggggaaggctgtacgacacgggtggggaaaggaggtgggggcggggagtattgaatggtggtggaagggtagagaggcgcggagtgaaccccacgccctgtctaaagtgtattttcagagccggcccgcctctcctcggttcaaggtcactgtttcctgggcacgcactgggttgcgggacagagtagccagtttctgccggtgctcggagaagagcgcagtgttttgcaagtgctggagtctcctgaggacacgcgcgtcgccgccaccgcgggtgtgggaaagcgcggacgtgctgggcgtctgtgcttcggtaggcgaccaccgcccctggccgcgctccgggctttcacggaaactcccgagaccgggccctgggttcctcctctcctactcggctctgcagtcctactcaagcgggtggctctgggatcctgggggcctgggttgggggctagggagacgccatgtgatggacactccagggacacacagcctagcacagcagcttataatgggctctccggggccatttgcaataacagctgcaattccctggatagacgagttgatttcctccctctgcccctcccccagccatgccagctggcctttgtaagtgcaggaaaccgagtagaaaatgtgaccctccaaatggagaagctgccagctttgccattgtgaaccatggtgaagtgcttggaacatactgttcactcactctaaaggcgctgagactgtgctgttgttctcgtttttatagtcaatggcttgttcatcatccagatgtggctactgacatatctacacttcgcaccggagtgtctggaattgtggctatcctgattataggattttaacttaactgaaatgcctgctttgaataaatgtgttgggttttt

SEQ ID NO: 1074 - protein, 279 aa, Homo sapien
  unsure 57: unknown amino acid
MPCRREEEEEAGEEAEGEEEEEDSFLLLQQSVALGSSGEVDRLVAQIGETLQLDAAXDSPASPCGPPGAPLRAPGPLAAAVPADKARSPAVPLLLPPALAETVGPAPPGVLRCALGDRGRVRGRAAPYCVAELATGPSALSPLPPQADLDGPPGAGKQGIPQPLSGPCRRGWLRGAAASRRLQQRRGSQPETRTGDDDPHRLLQQLVLSGNLIKEAVRRLHSRRLQLRAKLPQRPLLGPLSAPVHEPPSPRSPRAACSDPGASGRAQLRTGDGVLVPGS

SEQ ID NO: 1075 - DNA, 1444 bp, Homo sapien
ggggggggcggggcgcccagcgggatgcggtgaagggcgagcggcgcggcggctgcgatgagtgcctctgcggccaccggggtcttcgtgctgtccctctcggccatcccggtcacctatgtcttcaaccacctggcggcccagcatgattcctggactattgtaggggttgctgccctcatcctgttcctggtagcactgctggctcgtgtcctcgtcaaaagaaaaccaccccgggacccactgttctatgtgtatgcagtttttggatttaccagcgtggtgaacctcatcataggactggagcaagatggaatcattgacgggttcatgacacactacttgagagagggtgaaccgtatctgaacaccgcatatgggcacatgatctgctactgggatggctctgctcattatctgatgtacctggtgatggtggcagccatagcatgggaggaaacttatagaaccattggcctatattgggttggatctattattatgagtgttgttgtttttgtgccaggaaacattgtagggaagtatggaacacgaatttgccctgcttttttcttaagcataccatatacttgtcttcctgtctgggctggtttcagaatctataatcagccatcagaaaattataattacccctcaaaggttattcaagaagcccaagcgaaagacctgctgagaagaccatttgatttaatgttggttgtgtgtctcctcctggcaactggattttgcctgttcagaggtttgattgctttggattgcccatctgagctctgccgattatatacgcaatttcaagagccctatctaaaggatcctgctgcttatcctaaaattcagatgctggcatatatgttctattctgttccttactttgtgactgcactgtatggcttagtggttcctggatgttcctggatgcctgacatcacattgatacatgctggaggtctggctcaggctcagttttctcacattggtgcatctcttcatgctagaactgcttatgtctacagagtccctgaagaagcaaaaatcctttttttagcattaaacatagtatatggagttcttcctcagctcttggcctatcgttgtatctacaaaccagagttcttcataaaaacaaaggcagaagaaaaagtggaataaaaatattacttcatgttcctcctttctaaattactaacttttgttatactggtactgatattttgtcccatttcactctcttctcatacgtgagtacttaagaatatgtacattcttgctctgcactgtatgtgtgagctatatggtattgtgtaaattttttttgaaggaaaatggaaattcttgagaaacagtttgtttaaagaaatatattcaaaatcatttgtgaataaacttgatcatccatctcaaaaaaaaaaaaaaaaaaaaaaaa

SEQ ID NO: 1076 - protein, 370 aa, Homo sapien
MSASAATGVFVLSLSAIPVTYVFNHLAAQHDSWTIVGVAALILFLVALLARVLVKRKPPRDPLFYVYAVFGFTSVVNLIIGLEQDGIIDGFMTHYLREGEPYLNTAYGHMICYWDGSAHYLMYLVMVAAIAWEETYRTIGLYWVGSIIMSVVVFVPGNIVGKYGTRICPAFFLSIPYTCLPVWAGFRIYNQPSENYNYPSKVIQEAQAKDLLRRPFDLMLVVCLLLATGFCLFRGLIALDCPSELCRLYTQFQEPYLKDPAAYPKIQMLAYMFYSVPYFVTALYGLVVPGCSWMPDITLIHAGGLAQAQFSHIGASLHARTAYVYRVPEEAKILFLALNIVYGVLPQLLAYRCIYKPEFFIKTKAEEKVE

SEQ ID NO: 1077 - DNA, 2750 bp, Homo sapien
ggctgccggggaggccagagcgtggagcgctgcgcggcgcggcggccgggccctcgagacggggacggacacaccagcccctcagataccacttggccactcccgctgaggccactcccactgcgtggctgaagcctcgaggtcaccaggcggaggcgcggagatgcccctgcatcagctgggggacaagccgctcaccttccccagccccaactcagccatggaaaacgggcttgaccacaccccacccagcaggagggcatccccgggcacacccctgagccccggctccctccgctccgctgcccatagccccctggacaccagcaagcagcccctctgccagctctgggccgagaagcatggcgcccgggggacccatgaggtgcggtacatctcggccgggcagagcgtggcgtgcggctggtgggccttcgcaccgccgtgcctgcaggtcctcaacacgcccaagggcatcctgttcttcctgtgtgcggccgcattcctgcaggggatgactgtgaatggcttcatcaacacagtcatcacctccctggagcgccgctatgacctgcacagctaccagagcgggctcatcgccagctcctacgacattgccgcctgcctctgcctcaccttcgtcagctacttcgggggctcagggcacaagccgcgctggctgggctggggcgtgctgcttatgggcacgggttcgctggtgttcgcgctgccccacttcacggctggccgctatgaggtggagttggacgcgggtgtcaggacgtgccctgccaaccccggcgcggtgtgtgcggacagcacctcgggcctgtcccgctaccagctggtcttcatgctgggccagttcctgcatggcgtgggtgccacacccctctacacgctgggcgtcacctacctggatgagaacgtcaagtccagctgctcgcccgtctacattgccatcttctacacagcggccatcctgggcccagctgccggctacctgattggaggtgccctgctgaatatctacacggaaatgggccgacggacggagctgaccaccgagagcccactgtgggtcggcgcctggtgggtcggcttcctgggctctggggccgctgctttcttcaccgccgttcccatccttggttaccctcggcagctgccaggctcccagcgctacgcggtcatgagagcggcggaaatgcaccagttgaaggacagcagccgtggggaggcgagcaacccggactttgggaaaaccatcagagacctgcctctctccatctggctcctgctgaagaaccccacgttcatcctgctctgcctggccggggccaccgaggccactctcatcaccggcatgtccacgttcagccccaagttcttggagtcccagttcagcctgagtgcctcagaagctgccaccttgtttgggtacctggtggtgccagcgggtggtggcggcaccttcctgggcggcttctttgtgaacaagctcaggctccggggctccgcggtcatcaagttctgcctgttctgcaccgttgtcagcctgctgggcatcctcgtcttctcactgcactgccccagtgtgcccatggcgggcgtcacagccagctacggcgggagcctcctgcccgaaggccacctgaacctaacggctccctgcaacgctgcctgcagctgccagccagaacactacagccctgtgtgcggctcggacggcctcatgtacttctcactgtgccacgcagggtgccctgcagccacggagacgaatgtggacggccagaaggtgtaccgagactgtagctgtatccctcagaatctttcctctggttttggccatgccactgcagggaaatgcacttcaacttgtcagagaaagcccctccttctggttttcatattcgttgtaattttctttacattcctcagcagcattcctgcactaacggcaactctacgatgtgtccgtgaccctcagagatcctttgccctgggaatccagtggattgtagttagaatactagggggcatcccggggcccatcgccttcggctgggtgatcgacaaggcctgtctgctgtggcaggaccagtgtggccagcagggctcctgcttggtgtaccagaattcggccatgagccgctacatactcatcatggggctcctgtacaaggtgctgggcgtcctcttctttgccatagcctgcttcttatacaagcccctgtcggagtcttcagatggcctggaaacttgtctgcccagccagtcctcagcccctgacagtgccacagatagccagctccagagcagcgtctgaccaccgcccgcgcccacccggccacggcgggcactcagcatttcctgatgacagaacagtgccgttgggtgatgcaatcacacgggaacttctatttgacctgcaaccttctacttaacctgtggtttaaagtcggctgtgacctcctgtccccagagctgtacggccctgcagtgggtgggaggaacttgcataaatatatatttatggacacacagtttgcatcagaacgtgtttatagaatgtgttttatacccgatcgtgtgtggtgtgcgtgaggacaaactccgcaggggctgtgaatcccactgggagggcggcgggcctgcagcccgaggaaggcttgtgtgtcctcagttaaaactgtgcatatcgaaatatattttgttatttaagcctgaaaaaaaaaaaaaaaaaa

SEQ ID NO: 1078 - protein, 722 aa, Homo sapien
MPLHQLGDKPLTFPSPNSAMENGLDHTPPSRRASPGTPLSPGSLRSAAHSPLDTSKQPLCQLWAEKHGARGTHEVRYISAGQSVACGWWAFAPPCLQVLNTPKGILFFLCAAAFLQGMTVNGFINTVITSLERRYDLHSYQSGLIASSYDIAACLCLTFVSYFGGSGHKPRWLGWGVLLMGTGSLVFALPHFTAGRYEVELDAGVRTCPANPGAVCADSTSGLSRYQLVFMLGQFLHGVGATPLYTLGVTYLDENVKSSCSPVYIAIFYTAAILGPAAGYLIGGALLNIYTEMGRRTELTTESPLWVGAWWVGFLGSGAAAFFTAVPILGYPRQLPGSQRYAVMRAAEMHQLKDSSRGEASNPDFGKTIRDLPLSIWLLLKNPTFILLCLAGATEATLITGMSTFSPKFLESQFSLSASEAATLFGYLVVPAGGGGTFLGGFFVNKLRLRGSAVIKFCLFCTVVSLLGILVFSLHCPSVPMAGVTASYGGSLLPEGHLNLTAPCNAACSCQPEHYSPVCGSDGLMYFSLCHAGCPAATETNVDGQKVYRDCSCIPQNLSSGFGHATAGKCTSTCQRKPLLLVFIFVVIFFTFLSSIPALTATLRCVRDPQRSFALGIQWIVVRILGGIPGPIAFGWVIDKACLLWQDQCGQQGSCLVYQNSAMSRYILIMGLLYKVLGVLFFAIACFLYKPLSESSDGLETCLPSQSSAPDSATDSQLQSSV

SEQ ID NO: 1079 - DNA, 1664 bp, Homo sapien
gagttcggggccagcagccgtctacccggtgtcgcgttctgtgttgtggcggccctggatccggcgtcagggcgaccgggcggacgaggtggagccagagtctgtcaggcgggttggtgaagggcgcggggccgggcacggcgttgggagtgcgcggcagggaccggccaggcgggctgcaggcacctcagagcccgggacaccccctcaacgtccgcaggcgcgatgaaggcactgatcttagtggggggctatgggacgcggctacggccgctgacgctgagcaccccgaagccactggtggacttctgcaataagcccatcttgctgcaccaagtggaggcgctagccgcggcaggcgtggaccacgtgatcctggccgtgagctacatgtcgcaggtgctggagaaggaaatgaaggcacaggagcagaggctgggaatccgaatctccatgtcccatgaagaggagcctttggggacagctgggcccctggcgctggcccgtgacctactctctgagactgcagaccctttcttcgtcctcaacagtgacgtgatctgcgatttccccttccaagccatggtgcagttccaccggcaccatggccaggagggctccatcctggtgaccaaggtggaggaaccctccaagtacggtgtggtggtgtgtgaggctgacacaggccgcattcaccggttcgtggagaagccacaggtgtttgtgtccaataagatcaacgcaggcatgtacatcctgagccctgcagtgctgcggcgcatccagctgcagcctacgtccattgagaaggaggtcttccccattatggccaaggaggggcagctatatgccatggagttacagggcttctggatggacattgggcagcccaaggacttcctcactggcatgtgcctcttcctgcagtcactgaggcagaagcagcctgagcggctgtgctcaggccctggcattgtgggcaacgtgctggtggacccaagtgcccgcatcggccagaactgcagcattggccccaatgtgagcctgggacctggcgtggtggtcgaagatggtgtgtgtatccggcggtgcacggtgctgcgggatgcccggatccgttcccattcctggcttgagtcctgcattgtgggctggcgctgccgcgtgggtcagtgggtaagcctgtgggctgggctgggtggggagaggggcggggagtgtgcctgcctccctgacaaggcctatcctctcctggaggtacgcatggagaacgtgacagtgctgggtgaggacgtcatagttaatgatgagctctacctcaacggagccagcgtgctgccccacaagtctattggcgagtcagtgccagagcctcgtatcatcatgtgaggggatgcagtggggctggccgagccccggttttcccatcagcaaggggagtgctggcctgacacatcagaagaccctggacttgtcattatttgtctggggggcactgggtgaagctgaagctgttggacacctgccttctcatgtggacatcatctggcaggatccctgctgggcacaccccacaaaccccactccctcaagaagggccagggccagggctgtatggaataataatttaatgctcactgtgaaaaaaaaaaaaaaaaaaaaaa

SEQ ID NO: 1080 - protein, 387 aa, Homo sapien
MKALILVGGYGTRLRPLTLSTPKPLVDFCNKPILLHQVEALAAAGVDHVILAVSYMSQVLEKEMKAQEQRLGIRISMSHEEEPLGTAGPLALARDLLSETADPFFVLNSDVICDFPFQAMVQFHRHHGQEGSILVTKVEEPSKYGVVVCEADTGRIHRFVEKPQVFVSNKINAGMYILSPAVLRRIQLQPTSIEKEVFPIMAKEGQLYAMELQGFWMDIGQPKDFLTGMCLFLQSLRQKQPERLCSGPGIVGNVLVDPSARIGQNCSIGPNVSLGPGVVVEDGVCIRRCTVLRDARIRSHSWLESCIVGWRCRVGQWVSLWAGLGGERGGECACLPDKAYPLLEVRMENVTVLGEDVIVNDELYLNGASVLPHKSIGESVPEPRIIM

SEQ ID NO: 1081 - DNA, 1152 bp, Homo sapien
aaggctattattaccaccactgagtggcttaaataatcctgtcaacagcaatcgcccatttccaaagccatggtgaaacatctctgtgctaatttcttttgttttgtttcctaattttttttttttggcaggtggtgggaaataatctttgtcttctttggagtaaaccttcaacaccggattttttcttttaattatggatgtaaaccccaatatccccataatttacattgggtctcgaccaattgcctaattataagaggatatatttaggctcttatttcatccacacaaaaacttgtgtaacaggtagttggaaacatctgaggcaccactttgattctgttttggatggtcatgttttttctcctccgtttccccagcatgtctgccaccatcctcatgcactgcttccaagtgcctgggagcctttatgagcgtccctaaacctaaaagaatccagaggcggggctcggatgaaccctcgagataagcaagtgagccgcttctcccctctaaaggatgtttacacgtgggtggcactcgctggaatccagcgctcgggcagccctgggaggacgcgctcagctgcgaggaggatggagagcaatacatcatcatctttggagaatttagcgacggcgcctgtgaaccagatccaagaaacaatttctgataattgtgtggtgattttctcaaaaacatcctgttcttactgtacaatggcaaaaaagcttttccatgacatgaatgttaactataaagtggtggaactggacctgcttgaatatggaaaccagttccaagatgctctttacaaaatgactggtgaaagaactgttccaagaatatttgtcaatggtacttttattggaggtgcaactgacactcataggcttcacaaagaaggaaaattgctcccactagttcatcagtgttatttaaaaaaaagtaagaggaaagaatttcagtgatgtttatactaataagtttgctagtacagtgtcagttatttaaagtggtaatgcccgataatgtcttttaaatgtttgaggatgttttaaatacatgcattgtcttcacgaagaagatgtaaaaataatgaacaataaattgcggtggaaacctaaaaaaaaaaaaaaaaaaaaaaaa

SEQ ID NO: 1082 - protein, 165 aa, Homo sapien
MNPRDKQVSRFSPLKDVYTWVALAGIQRSGSPGRTRSAARRMESNTSSSLENLATAPVNQIQETISDNCVVIFSKTSCSYCTMAKKLFHDMNVNYKVVELDLLEYGNQFQDALYKMTGERTVPRIFVNGTFIGGATDTHRLHKEGKLLPLVHQCYLKKSKRKEFQ

SEQ ID NO: 1083 - DNA, 3165 bp, Homo sapien
ggggatttggctagaaggctgggccggcagcggttgtgaggagttagctcgcggcattgcaggctctgagaggaggggacccggttcccgggtgagtgtccaggcatgccagcggaacggcccgcgggcagcggcggctcggaggctccagcaatggttgaacaactggacactgctgtgattaccccggccatgctagaagaggaagaacagcttgaagctgctggactagagagagagcggaagatgctggaaaaggctcgcatgtcttgggatagagagtcgacagaaattcggtaccgtagacttcaacatttgcttgaaaaaagcaatatctactccaaatttttattgacgaaaatggaacagcaacaattagaggaacagaagaagaaagaaaaattggagagaaaaaaggagtctttaaaagttaaaaagggtaaaaattcaattgatgcaagtgaagagaagccagttatgaggaaaaaaagaggaagagaagatgaatcatacaatatttcagaggtcatgtcaaaagaggaaattttgtctgtggctaaaaaaaataaaaaggagaatgaggatgaaaactcctcctctactaatctctgtgtggaagatcttcagaaaaataaagattcgaatagtataattaaagatagattgtctgaaacggttaggcagaatactaaattcttttttgacccagtccggaagtgtaatggtcagccagtaccttttcaacaaccaaagcacttcactggaggagtgatgcgatggtaccaagtagaaggcatggaatggcttaggatgctttgggaaaatggaattaatggcattttagcagatgaaatgggattgggtaagacagttcagtgcattgctactattgcattgatgattcagagaggagtaccaggaccttttcttgtctgtggccctttgtctacacttcctaactggatggctgaattcaaaagatttacaccagatatccctacaatgttatatcatggaacccaggaggaacgtcaaaaattggtaagaaatatttacaaacggaaagggactttgcagattcatcctgtggtaatcacgtcatttgaaatagccatgagagaccgaaatgcgttacagcattgctattggaaatacttaatagtagatgaaggacacaggattaagaatatgaagtgccgtctaatcagggagttaaaacgattcaatgctgataacaaacttcttttgactggtactcccttgcaaaacaatttatcagaactttggtcattgctaaactttttgttgccagatgtatttgatgacttgaaaagctttgagtcttggtttgacatcactagtctttctgaaactgctgaagatattattgctaaagaaagagaacagaatgtattgcatatgctgcaccagattttaacacctttcttattgagaagactgaagtctgatgttgctcttgaagttcctcctaaacgagaagtagtcgtttatgctccactttcaaagaagcaggagatcttttatacagccattgtgaaccgtacaattgcaaacatgtttggatccagtgagaaagaaacaattgagttaagtcctactggtcgaccaaaacgacgaactagaaaatcaataaattacagcaaaatagatgatttccctaatgaattggaaaaactgatcagtcaaatacagccagaggtggaccgagaaagagctgttgtggaagtgaatatccctgtagaatctgaagttaatctgaagctgcagaatataatgatgctacttcgtaaatgttgtaatcatccatatttgattgaatatcctatagaccctgttacacaagaatttaagatcgatgaagaattggtaacaaattctgggaagttcttgattttggatcgaatgctgccagaactaaaaaaaagaggtcacaaggtgctgcttttttcacaaatgacaagcatgttggacattttgatggattactgccatctcagagatttcaacttcagcaggcttgatgggtccatgtcttactcagagagagaaaaaaacatgcacagcttcaacacggatccagaggtgtttatcttcttagtgagtacacgagctggtggcctgggcattaatctgactgcagcagatacagttatcatttatgatagtgattggaacccccagtcggatcttcaggcccaggatagatgtcatagaattggtcagacaaagccagttgttgtttatcgccttgttacagcaaatactatcgatcagaaaattgtggaaagagcagctgctaaaaggaaactggaaaagttgatcatccataaaaatcatttcaaaggtggtcagtctggattaaatctgtctaagaatttcttagatcctaaggaattaatggaattattaaaatctagagattatgaaagggaaataaaaggatcaagagagaaggtcattagtgataaagatctagagttgttgttagatcgaagtgatcttattgatcaaatgaatgcttcaggaccaattaaagagaagatggggatattcaagatattagaaaattctgaagattccagtcctgaatgtttgttttaaagtggagctcaagaatagcttttaaaagttcttatttacatctagtgatttccctgtattgggtttgaaatactgattgtccacttcaccttttttattatatcagttgacatgtaactagtaccatgcgtacttaaatagatggtaattttctgagccttaccaagaacaaagaagtatccatattaagtttagattttcagttaatttttgagactgagtagtattcttggatacaggctgatgtgtacttaaccacttccagatttatacagtcttcctgtggaagtttagtaaatgtctttttccctcctttcttctagtaatgcagttcatgggctttaggtacttcagttatgaagtaggcttttcatggggagagattgggattatgctttctgttgtttaagaaactgtttgattttagagtctatttctatgagatagtttaccaaataaatgttccttataagatgaaaaaaaaaaaaaaaaaaaaaaaaaaaaaaaaaaaaaaaaaaaaaaaaaaaaaaaaaaaaaaaaaaa

SEQ ID NO: 1084 - protein, 838 aa, Homo sapien
MPAERPAGSGGSEAPAMVEQLDTAVITPAMLEEEEQLEAAGLERERKMLEKARMSWDRESTEIRYRRLQHLLEKSNIYSKFLLTKMEQQQLEEQKKKEKLERKKESLKVKKGKNSIDASEEKPVMRKKRGREDESYNISEVMSKEEILSVAKKNKKENEDENSSSTNLCVEDLQKNKDSNSIIKDRLSETVRQNTKFFFDPVRKCNGQPVPFQQPKHFTGGVMRWYQVEGMEWLRMLWENGINGILADEMGLGKTVQCIATIALMIQRGVPGPFLVCGPLSTLPNWMAEFKRFTPDIPTMLYHGTQEERQKLVRNIYKRKGTLQIHPVVITSFEIAMRDRNALQHCYWKYLIVDEGHRIKNMKCRLIRELKRFNADNKLLLTGTPLQNNLSELWSLLNFLLPDVFDDLKSFESWFDITSLSETAEDIIAKEREQNVLHMLHQILTPFLLRRLKSDVALEVPPKREVVVYAPLSKKQEIFYTAIVNRTIANMFGSSEKETIELSPTGRPKRRTRKSINYSKIDDFPNELEKLISQIQPEVDRERAVVEVNIPVESEVNLKLQNIMMLLRKCCNHPYLIEYPIDPVTQEFKIDEELVTNSGKFLILDRMLPELKKRGHKVLLFSQMTSMLDILMDYCHLRDFNFSRLDGSMSYSEREKNMHSFNTDPEVFIFLVSTRAGGLGINLTAADTVIIYDSDWNPQSDLQAQDRCHRIGQTKPVVVYRLVTANTIDQKIVERAAAKRKLEKLIIHKNHFKGGQSGLNLSKNFLDPKELMELLKSRDYEREIKGSREKVISDKDLELLLDRSDLIDQMNASGPIKEKMGIFKILENSEDSSPECLF

SEQ ID NO: 1085 - DNA, 850 bp, Homo sapien
gaattccggcaaaatgcatgacagtaacaatgtggagaaagacattacaccatctgaattgcctgcaaacccaggttgtctgcattcaaaagagcattctattaaagctaccttaatttggcgcttatttttcttaatcatgtttctgacaatcatagtgtgtggaatggttgctgctttaagcgcaataagagctaactgccatcaagagccatcagtatgtcttcaagctgcatgcccagaaagctggattggttttcaaagaaagtgtttctatttttctgatgacaccaagaactggacatcaagtcagaggttttgtgactcacaagatgctgatcttgctcaggttgaaagcttccaggaactgaatttcctgttgagatataaaggcccatctgatcactggattgggctgagcagagaacaaggccaaccatggaaatggataaatggtactgaatggacaagacagtttcctatcctgggagcaggagagtgtgcctatttgaatgacaaaggtgccagtagtgccaggcactacacagagaggaagtggatttgttccaaatcagatatacatgtctagatgttacagcaaagccccaactaatctttagaagcatattggaactgataactccattttaaaatgagcaaagaatttatttcttataccaacaggtatatgaaaatatgctcaatatcactaataactgggaaaatacaaatcaaaatcatagtaaaatattacctgttttcatggtgctaatattacctgttctcccactgctaatgacatacccgagaatgagtaatttataaataaaagagatttaattgaaaaaaa

SEQ ID NO: 1086 - protein, 191 aa, Homo sapien
MHDSNNVEKDITPSELPANPGCLHSKEHSIKATLIWRLFFLIMFLTIIVCGMVAALSAIRANCHQEPSVCLQAACPESWIGFQRKCFYFSDDTKNWTSSQRFCDSQDADLAQVESFQELNFLLRYKGPSDHWIGLSREQGQPWKWINGTEWTRQFPILGAGECAYLNDKGASSARHYTERKWICSKSDIHV

SEQ ID NO: 1087 - DNA, 4083 bp, Homo sapien
ctcctcctccgtctcctcctctctctctcatctgctgtggttatggcctgtcgctggagcacaaaagagtctccgcggtggaggtctgcgttgctcttgcttttcctcgctggggtgtacggaaatggtgctcttgcagaacattctgaaaatgtgcatatttcaggagtgtcaactgcttgtggagagactccagagcaaatacgagcaccaagtggcataatcacaagcccaggctggccttctgaatatcctgcaaaaatcaactgtagctggttcataagggcaaacccaggcgaaatcattactataagttttcaggattttgatattcaaggatccagaaggtgcaatttggactggttgacaatagaaacatacaagaatattgaaagttacagagcttgtggttccacaattccacctccgtatatctcttcacaagaccacatctggattaggtttcattcggatgacaacatctctagaaagggtttcagactggcatatttttcagggaaatctgaggaaccaaattgtgcttgtgatcagtttcgttgtggtaatggaaagtgtataccagaagcctggaaatgtaataacatggatgaatgtggagatagttccgatgaagagatctgtgccaaagaagcaaatcctccaactgctgctgcttttcaaccctgtgcttacaaccagttccagtgtttatcccgttttaccaaagtttacacttgcctccccgaatctttaaaatgtgatgggaacattgactgccttgacctaggagatgagatagactgtgatgtgccaacatgtgggcaatggctaaaatatttttatggtacttttaattctcccaattatccagacttttatcctcctggaagcaattgcacctggttaatagacactggtgatcaccgtaaagtcattttacgcttcactgactttaaacttgatggtactggttatggtgattatgtcaaaatatatgatggattagaggagaatccacacaagcttttgcgtgtgttgacagcttttgattctcatgcacctcttacagttgtttcttcttctggacagataagggtacatttttgtgctgataaagtgaatgctgcaaggggatttaatgctacttaccaagtagatgggttctgtttgccatgggaaataccctgtggaggtaactgggggtgttatactgagcagcagcgttgtgatgggtattggcattgcccaaatggaagggatgaaaccaattgtaccatgtgccagaaggaagaatttccatgttcccgaaatggtgtctgttatcctcgttctgatcgctgcaactaccagaatcattgcccaaatggctcagatgaaaaaaactgctttttttgccaaccaggaaatttccattgtaaaaacaatcgttgtgtgtttgaaagttgggtgtgtgattctcaagatgactgtggtgatggcagcgatgaagaaaattgcccagtaatcgtgcctacaagagtcatcactgctgccgtcatagggagcctcatctgtggcctgttactcgtcatagcattgggatgtacttgtaagctttattctctgagaatgtttgaaagaagatcatttgaaacacagttgtcaagagtggaagcagaattgttaagaagagaagctcctccctcgtatggacaattgattgctcagggtttaattccaccagttgaagattttcctgtttgttcacctaatcaggcttctgttttggaaaatctgaggctagcggtacgatctcagcttggatttacttcagtcaggcttcctatggcaggcagatcaagcaacatttggaaccgtatttttaattttgcaagatcacgtcattctgggtcattggctttggtctcagcagatggagatgaggttgtccctagtcagagtaccagtagagaacctgagagaaatcatactcacagaagtttgttttccgtggagtctgatgatacagacacagaaaatgagagaagagatatggcaggagcatctggtggggttgcagctcctttgcctcaaaaagtccctcccacaacggcagtagaagcgacagtaggagcatgtgcaagttcctcaactcagagtacccgaggtggtcatgcagataatggaagggatgtgacaagtgtggaacccccaagtgtgagtccagcacgtcaccagcttacaagtgcactcagtcgtatgactcaggggctacgctgggtacgttttacattaggacgatcaagttccctaagtcagaaccagagtcctttgagacaacttgataatggggtaagtggaagagaagatgatgatgatgttgaaatgctaattccaatttctgatggatcttcagactttgatgtgaatgactgctccagacctcttcttgatcttgcctcagatcaaggacaagggcttagacaaccatataatgcaacaaatcctggagtaaggccaagtaatcgagatggcccctgtgagcgctgtggtattgtccacactgcccagataccagacacttgcttagaagtaacactgaaaaacgaaacgagtgatgatgaggctttgttactttgttaggtacgaatcacataagggagattgtatacaagttggagcaatatccatttattattttgtaactttacagttaaactagttttagtttaaaaagaaaaaatgcagggtgatttcttattattatatgttagcctgcatggttaaattcgacaacttgtaactctatgaacttagagtttactattttagcagctaaaaatgcatcacatattcatattgttcaataatgtcctttcatttgtttctgattgttttcatcctgatactgtagttcactgtagaaatgtggctgctgaaactcatttgattgtcatttttatctatcctatgttaaatggtttgtttttacaaaataataccttattttaattgaaacgtttatgcttttgccaacacatcttgtaacttaatatactagatgttaaggttgttaatgtacaaaaaaaaaacccttatactcacctgcgttttcatttgtttgacatttgtctattattggatttcattatcatatgaacttgtcagtgggaaacaaactgtctaaaaatttttctcttacgtttaacatacaatcatgtgaaatttaggcagagttcgataaattactggcaaaaacaaaactcttttataaagattttctaatgttgactttaatactctaacatggtacaaaccaaatggtaaaatcccaagtcatttcttttttcatctctatttagcaacagaattaagtggatgaagatattctactatgcattaaatcttgaactttataaaacatgtacaaaaattgtacaagataagttccacctggtaatgtctttccctaatacagggttgcgcttgcattggaccctagggatttgcactaaaattatatcaaggtctcagatgagcttagtgcacaagcactatcactttaaatactattatttgctaccacagcaactatatatttccatagcttttggctgggggcgggggacatttttattacaacttgaaattgctttgctggtttcatatttatttgttgtatttaaaaaatacattgttgtaagagtgattttttcaatatattttattcctgggggggatcatgctacactctcaaaagaaaattaagaaatcattcagatcatcccccctttttaagtagtgtgaattgcaaaacccaacatattttttttactgtcagttgcggtttatttattctttaactgtctgttttagtagtttaatgattatgaaaaatgtatctgtgtgtgatttgctatttattaaattttaagtactttgctgaatgtcattttaaagcatgtttgaagtcttgtgtatttgtctgtgttaatgctgtcaggaggaactgactaagatgttttaatatgtatcaaaaattaaaatgattttttttattgccttgaggtactttttaaaaaaaaaaaaaaaaaaaaaaaaaaa

SEQ ID NO: 1088 - protein, 859 aa, Homo sapien
MACRWSTKESPRWRSALLLLFLAGVYGNGALAEHSENVHISGVSTACGETPEQIRAPSGIITSPGWPSEYPAKINCSWFIRANPGEIITISFQDFDIQGSRRCNLDWLTIETYKNIESYRACGSTIPPPYISSQDHIWIRFHSDDNISRKGFRLAYFSGKSEEPNCACDQFRCGNGKCIPEAWKCNNMDECGDSSDEEICAKEANPPTAAAFQPCAYNQFQCLSRFTKVYTCLPESLKCDGNIDCLDLGDEIDCDVPTCGQWLKYFYGTFNSPNYPDFYPPGSNCTWLIDTGDHRKVILRFTDFKLDGTGYGDYVKIYDGLEENPHKLLRVLTAFDSHAPLTVVSSSGQIRVHFCADKVNAARGFNATYQVDGFCLPWEIPCGGNWGCYTEQQRCDGYWHCPNGRDETNCTMCQKEEFPCSRNGVCYPRSDRCNYQNHCPNGSDEKNCFFCQPGNFHCKNNRCVFESWVCDSQDDCGDGSDEENCPVIVPTRVITAAVIGSLICGLLLVIALGCTCKLYSLRMFERRSFETQLSRVEAELLRREAPPSYGQLIAQGLIPPVEDFPVCSPNQASVLENLRLAVRSQLGFTSVRLPMAGRSSNIWNRIFNFARSRHSGSLALVSADGDEVVPSQSTSREPERNHTHRSLFSVESDDTDTENERRDMAGASGGVAAPLPQKVPPTTAVEATVGACASSSTQSTRGGHADNGRDVTSVEPPSVSPARHQLTSALSRMTQGLRWVRFTLGRSSSLSQNQSPLRQLDNGVSGREDDDDVEMLIPISDGSSDFDVNDCSRPLLDLASDQGQGLRQPYNATNPGVRPSNRDGPCERCGIVHTAQIPDTCLEVTLKNETSDDEALLLC

SEQ ID NO: 1089 - DNA, 1635 bp, Homo sapien
gggggtggcggggacgcgagtggcggccgcggggccccggacaagggtccgcagagctgcagccttcgagggccagccctctccgagtccggggctgggtcccaccagtgacaaggcggcagccccgcgcacaccaaagagaaagcggctgtggcggcagcggcagccccagccatgctgtgttatgtgacgaggccggacgcggtgctgatggaggtggaggtggaggcgaaagccaacggcgaggactgcctcaaccaggtgtgcaggcgactgggaatcatagaagttgactattttggactgcaatttacgggtagcaaaggtgaaagtttatggctaaacctgagaaaccggatctcccagcagatggatgggctagccccttacaggcttaaacttagagtcaagttcttcgtggagcctcatctcatcttacaggagcagactaggcatatctttttcttgcacatcaaggaggccctcttggcaggccacctcttgtgttccccagagcaggcagtggaactcagtgccctcctggcccagaccaagtttggagactacaaccagaacactgccaagtataactatgaggagctctgtgccaaggagctctcctctgccaccttgaacagcattgttgcaaaacataaggagttggaggggaccagccaggcttcagctgaataccaagttttgcagattgtgtcggcaatggaaaactatggcatagaatggcattctgtgcgggatagcgaagggcagagactgctcattggggttggacctgaaggaatctcaatttgtaaagatgactttagcccaattaataggatagcttatcctgtggtgcagatggccacccagtcaggaaagaatgtatatttgacggtcaccaaggaatctgggaacagcatcgtgctcttgtttaaaatgatcagcaccagggcggccagcgggctctaccgagcgataacagagacgcacgcattctacaggtgtgacacagtgaccagcgccgtgatgatgcagtatagccgtgacttgaagggccacttggcatctctgtttctgaatgaaaacattaaccttggcaagaaatatgtctttgatattaaaagaacatcaaaggaggtgtatgaccatgccaggagggctctgtacaatgctggcgttgtggacctcgtttcaagaagcaaccagagcccttcacactcgcctctgaagtcctcagaaagcagcatgaactgcagcagctgcgagggcctcagctgccagcagacccgggtgctgcaggagaagctacgcaagctgaaggaagccatgctgtgcatggtgtgctgcgaggaggagatcaactccaccttctgtccctgtggccacactgtgtgctgtgagagctgcgccgcccagctacagtcatgtcccgtctgcaggtcgcgtgtggagcatgtccagcacgtctatctgccaacgcacaccagtcttctcaatctgactgtaatctaatctgttgtgcttttgttggacttggcatgtttccatgaactgcactattataaactattaaaatgatagatgttggagaaagtaattattccaacacccatctgcccatgcgatgttaaaaaa

SEQ ID NO: 1090 - protein, 445 aa, Homo sapien
MLCYVTRPDAVLMEVEVEAKANGEDCLNQVCRRLGIIEVDYFGLQFTGSKGESLWLNLRNRISQQMDGLAPYRLKLRVKFFVEPHLILQEQTRHIFFLHIKEALLAGHLLCSPEQAVELSALLAQTKFGDYNQNTAKYNYEELCAKELSSATLNSIVAKHKELEGTSQASAEYQVLQIVSAMENYGIEWHSVRDSEGQRLLIGVGPEGISICKDDFSPINRIAYPVVQMATQSGKNVYLTVTKESGNSIVLLFKMISTRAASGLYRAITETHAFYRCDTVTSAVMMQYSRDLKGHLASLFLNENINLGKKYVFDIKRTSKEVYDHARRALYNAGVVDLVSRSNQSPSHSPLKSSESSMNCSSCEGLSCQQTRVLQEKLRKLKEAMLCMVCCEEEINSTFCPCGHTVCCESCAAQLQSCPVCRSRVEHVQHVYLPTHTSLLNLTVI

SEQ ID NO: 1091 - DNA, 2216 bp, Homo sapien
ggaagctcagcagtgtccactgtcgccattccttggccatagaaaacaatgtatttgaattttgatgtaagcatagcaaattgaagatgaagatgacacgttgatttcttgtttgaaattaaccaagtcccgagaaaagaaagtgaatagtgttagcacgaggaggaaggaagaaatggagattagattggatactctttctgcatcactgggtagatccagcactttaaatgactgcaacttggaagataaattagcttggtatgaaggtgaagcttacatgtggcatcactggaagccttttcctgaaaaccctctctggacatgtcttgatttccaaatagcacaagttggaccctgggactactgctcctcttgtattcgccacacacgtctcaagtcttcctgctcagatatggatctcctacattcatggcgaagcagcagttttgggaatttcgatcgttttcggaataattctttatcaaaaccagatgattcaactgaggcacatgaaggagatcccacaaatggaagtggagaacaaagtaaaacttcaaataatggaggcggtttgggtaaaaaaatgagagctatttcatggacaatgaagaaaaaagtgggtaaaaagtacatcaaagccctttctgaggaaaaggatgaggaagatggagagaatgcccacccatatagaaacagtgaccctgtgattgggacccacacagagaaggtgtccctcaaagccagtgactccatggatagtctctacagtggacagagctcatcaagtggcataacaagctgttcagatggtacaagtaaccgggacagctttcgactggatgacgatggcccctattcaggaccattctgtggccgtgccagagtgcatacggatttcacgccaagtccctatgacactgactccctcaaaatcaagaaaggagacatcatagacattatttgcaaaacaccaatggggatgtggacaggaatgttgaacaataaagtgggaaacttcaaattcatttatgtggatgtcatctcagaagaggaagcagcccccaagaaaataaaggcaaaccgaaggagtaacagcaaaaaatccaagactctgcaggagttcctagagaggattcatctgcaggaatacacctcaacacttttgctcaatggttatgagactctagaagatttaaaagatataaaagagagtcacctcattgaattaaatattgaaaacccagatgacagaagaaggttactatcagctgctgaaaacttccttgaagaagaaattattcaagagcaagaaaatgaacctgagcccctatccttgagctcagacatctccttaaataagtcacagttagatgactgcccaagggactctggttgctatatctcatcaggaaattcagataatggcaaagaggatctggagtctgaaaatctgtctgacatggtacataagattattatcacagagccaagtgactgaacacgcattcccaactatatatctacagatgcattccattttaactcttcttgagctaaaacgtcaaataggagaggaagataagataaatatttgtaaataaaacctaaagtttaaatgttttaatctgaataattgtacataaaattttgtatctctaacattccaaattactgtcaataaaatatatatttattattttaaatgctatgtgttaatatttcacttgcttgtattagaaaggcaaaatgtaagactttggtatgtgtgacatatgctttatttggctttattttacaagtacagtatctgcaaaaaacaaagtaaccttttttcatacctgccagttttgaatttatatatgttattgaacaaatagtaatagaggattcgctgttgaaacaagttgtccaagcaatgttatattcatttttatacttattgggaaagtgtgagttaatattggacacattttatcctgatccacagtggagttttagtaattatattttgttgatttcttcattttgttttctggtataaaagtagagataatgtgtagtcacttctgatttagtgaaaccaattgtaataattgtggaaatgttttgtctttaagtgtaaatattttaaaatttgacataccctaatgttaataataaaaagaactatttgcataaaaaaaaaaaaaaaaaaaaaaaaaaaaaaaaaaaaa

SEQ ID NO: 1092 - protein, 441 aa, Homo sapien
MEIRLDTLSASLGRSSTLNDCNLEDKLAWYEGEAYMWHHWKPFPENPLWTCLDFQIAQVGPWDYCSSCIRHTRLKSSCSDMDLLHSWRSSSFGNFDRFRNNSLSKPDDSTEAHEGDPTNGSGEQSKTSNNGGGLGKKMRAISWTMKKKVGKKYIKALSEEKDEEDGENAHPYRNSDPVIGTHTEKVSLKASDSMDSLYSGQSSSSGITSCSDGTSNRDSFRLDDDGPYSGPFCGRARVHTDFTPSPYDTDSLKIKKGDIIDIICKTPMGMWTGMLNNKVGNFKFIYVDVISEEEAAPKKIKANRRSNSKKSKTLQEFLERIHLQEYTSTLLLNGYETLEDLKDIKESHLIELNIENPDDRRRLLSAAENFLEEEIIQEQENEPEPLSLSSDISLNKSQLDDCPRDSGCYISSGNSDNGKEDLESENLSDMVHKIIITEPSD

SEQ ID NO: 1093 - DNA, 1256 bp, Homo sapien
cgggaatccctgcagctgagcctgtctctcacgggaccgggaagctggagagagccccaaccctgcccgctggggccgagctccctgctcctgcagcagtcccatgccccacactctgagtctgccctatccacagctgctgggcctctctgtggccaccatggtgactcttacctacttcggggcccactttgctgtcatccgccgagcgtccctggagaagaacccgtaccaggctgtgcaccaatgggccttctctgcggggttgagcctggtgggcctcctgactctgggagccgtgctgagcgctgcagccaccgtgagggaggcccagggcctcatggcagggggcttcctgtgcttctccctggcgttctgcgcacaggtgcaggtggtgttctggagactccacagccccacccaggtggaggacgccatgctggacacctacgacctggtatatgagcaggcgatgaaaggtacgtcccacgtccggcggcaggagctggcggccatccaggacgtgtttctgtgctgtgggaagaagtctcctttcagccgtctggggagcacagaggctgacctgtgtcagggagaggaggcggcgagagaggactgccttcagggcatccggagcttcctgaggacacaccagcaggtcgcctccagcctgaccagcatcggcctggccctcacggtgtccgccttgctcttcagctccttcctgtggtttgccatccgctgtggctgcagcttggaccgcaagggcaaatacaccctgaccccacgagcatgtggccgccagccccaggagcccagcctcttgagatgctcccagggtggacccacacattgtctccactccgaagcagttgctattggtccaagaggatgctcgggtagtcttcggtggctgcaggagagcgatgctgcgcctctgcccctctcctgccacctggctgcccacagagctctccagggcagaagtcgcggtgggctcagtgggtgccctgagcggggtctctcagactgacgtcaggccttggtgggctgcactctcacctggaggctccggggaagcatctgcctccaggaccattcaggctgttgacaagtcaactcctcatggctgtaggactgaggttcccaagtccttgtccctggtcctgtggtccctccaccttcaaaccagcaatggtgcattgagcaaattgtggtcaaatatacatcacatcaaatttaccatcttaaaaaaa

SEQ ID NO: 1094 - protein, 124 aa, Homo sapien
MVTLTYFGAHFAVIRRASLEKNPYQAVHQWAFSAGLSLVGLLTLGAVLSAAATVREAQGLMAGGFLCFSLAFCAQVQVVFWRLHSPTQVEDAMLDTYDLVYEQAMKVSVLWEEVSFQPSGEHRG

SEQ ID NO: 1095 - DNA, 1543 bp, Homo sapien
ggaaaaaaaaaaaaaaaaaaaaaaaaaaaaaaaaaaaaaaaaaatctcactcatttgttcatatattggtctctgaggtcccttctaggctctgacaactggaaactctgaaaatagacatattgatgtctttgactgttggaaaccttgcagagcaagaatttgtaaccattgcacgtcactaccgtgtgcctgagggcacatgttcagatatggatttcttaatcgcactggcccacgaaaagttcaagaaaaatatgtttgagaatttcgacactttcatttattcctgtgtgtatgaagatcgagaaaaaaaaaatgtattacccaccaaagacattaaaaggctgtgcaaatcctccagattacctttgagtgatgatcttctagaatccttattgtcaaggtttgaagacagtgaaaaacaaatagattataagtcatttttctctgccctgaactggagaaagaatccagcgcctgaattgcaaccagcatcataccttaaagagagatgtgaagatgtttggcttggtatgccatcacctattcctgcgaaatacattgactactggacctttttgaaggacgcgtttggcttagaggaggaataaccatgccagttttggtcaattctctatgatttacttctctcattttgccacatttactttagtagatataatttcattaaaaacaaaaaagaaacaaggtttatattaaatggaaatccataaaccacaattaatcctattttgtcatgttagttttacagaacatcatgttacattgccgacgtactgttactatttaaaatgccatcttaaaacatgttgaatatttttattatatgtatggtttattaataccaaaaaatcttctgataatttttgatccaacataatttgattcattactatatgaacagaaaatgacttttgaaggttatacatgacaatacaaaatcaaattatatcacagcaataagttgtgattctattaaacatttttgaaacctttttgacacgtttattacttacataattaagttttgtagcaacccacctcatcaaaataattcttaaacctctctagagtaaatatatttatcttttgaacttagtaaagctatgggaagaaaaagaacctccaacacacacacacacacacacacacacgcacgtgcacacacactggaaacatatgcagtatttatatttgtaatgcccttttttctatctaaagtcagcttgttagcctaggaatatatgcatgtgtgtataattatagtttgaccaaaactttattatgtctaaaatatttacaaatgtgaaagctgaagattttgagatttttgttttttttttggtttgttttacacacacatcccacgcgccccaccctagaggtttaaatattcagaaactacaacatttttcccctgcatttttctagttctatttttatttttcttcagcagaactcttgtcatgtagtgtacatttgattaaaacccatagccatgtaaaaaaaaaaaaaaaaa

SEQ ID NO: 1096 - protein, 162 aa, Homo sapien
MSLTVGNLAEQEFVTIARHYRVPEGTCSDMDFLIALAHEKFKKNMFENFDTFIYSCVYEDREKKNVLPTKDIKRLCKSSRLPLSDDLLESLLSRFEDSEKQIDYKSFFSALNWRKNPAPELQPASYLKERCEDVWLGMPSPIPAKYIDYWTFLKDAFGLEEE

SEQ ID NO: 1097 - DNA, 1242 bp, Homo sapien
atttcatgttatacttaataaaacaaaacatacctgtatacacacacattcactcacattgaagatgcaagatgaagaaagatacatgacattgaatgtacagtcaaagaaaaggagttctgcccaaacatctcaacttacatttaaagattattcagtgacgttgcactggtataaaatcttactgggaatatctggaaccgtgaatggtattctcactttgactttgatctccttgatcctgttggtttctcagggagtattgctaaaatgccaaaaaggaagttgttcaaatgccactcagtatgaggacactggagatctaaaagtgaataatggcacaagaagaaatataagtaataaggacctttgtgcttcgagatctgcagaccagacagtactatgccaatcagaatggctcaaataccaagggaagtgttattggttctctaatgagatgaaaagctggagtgacagttatgtgtattgtttggaaagaaaatctcatctactaatcatacatgaccaacttgaaatggcttttatacagaaaaacctaagacaattaaactacgtatggattgggcttaactttacctccttgaaaatgacatggacttgggtggatggttctccaatagattcaaagatattcttcataaagggaccagctaaagaaaacagctgtgctgccattaaggaaagcaaaattttctctgaaacctgcagcagtgttttcaaatggatttgtcagtattagagtttgacaaaattcacagtgaaataatcaatgatcactatttttggcctattagtttctaatattaatctccaggtgtaagattttaaagtgcaattaaatgccaaaatctcttctcccttctccctccatcatcgacactggtctagcctcagagtaacccctgttaacaaactaaaatgtacacttcaaaatttttacgtgatagtataaaccaatgtgacttcatgtgatcatatccaggatttttattcgtcgcttattttatgccaaatgtgatcaaattatgcctgtttttctgtatcttgcgttttaaattcttaataaggtcctaaacaaaatttcttatatttctaatggttgaattataatgtgggtttatacattttttacccttttgtcaaagagaattaactttgtttccaggcttttgctactcttcactcagctacaataaacatcctgaatgttttcttaaaaaa

SEQ ID NO: 1098 - protein, 231 aa, Homo sapien
MQDEERYMTLNVQSKKRSSAQTSQLTFKDYSVTLHWYKILLGISGTVNGILTLTLISLILLVSQGVLLKCQKGSCSNATQYEDTGDLKVNNGTRRNISNKDLCASRSADQTVLCQSEWLKYQGKCYWFSNEMKSWSDSYVYCLERKSHLLIIHDQLEMAFIQKNLRQLNYVWIGLNFTSLKMTWTWVDGSPIDSKIFFIKGPAKENSCAAIKESKIFSETCSSVFKWICQY

SEQ ID NO: 1099 - DNA, 4619 bp, Homo sapien
gaaggcgtcccggcatcggccaagattctacattgctcatctgggcatctgagcctccttcgaagtttcctgtcacaactgtcctcttgacagcatggatgaggaggaagacaatctgtctctgctgaccgcactgctggaagaaaatgagtcagccttggattgtaattcagaagaaaataacttcttgacgcgggaaaatggcgagcccgacgcatttgatgagctctttgatgccgacggcgacggtgaatcttatacagaagaggctgatgatggagaaacaggagagacaagagacgaaaaggaaaatctggccactctctttggagatatggaggacttaacagatgaagaagaagttcccgcatcacagtcaactgaaaatagggtcctccctgctcctgcccccaggcgagagaaaacgaatgaagagttgcaagaggaattaaggaatttgcaagagcaaatgaaggccttacaagagcagctaaaagtaacaacaattaaacagacagcaagcccagcccgtctgcaaaaatcccctgagaagtctccccggccacctcttaaggagaggagagttcagagaattcaggagtcaacatgcttttctgcggagcttgatgtccctgcgctaccaagaaccaagagggtggctcgaacaccaaagccttcacctccagatcccaaaagctcatcttcaaggatgacaagtgcaccctcccaacccctacagacgatttctcggaacaaacctagtgggataactagaggtcaaattgtggggaccccaggaagttctggggaaacgactcaacccatctgtgtggaagccttctctggtctgcggctcaggcggcctcgagtatcctccacagaaatgaacaagaaaatgaccggccgaaaactgatcagactgtctcagatcaaggaaaagatggccagagagaagctggaagaaatagattgggtgacatttggggttatattgaagaaggttacgccacagagtgtgaatagtggaaaaaccttcagcatatggaaactgaatgatcttcgtgacctgacacaatgtgtgtccttgttcttatttggagaagttcacaaagcgctctggaagacggagcaggggactgtcgtagggatcctcaatgccaaccccatgaagcccaaggatggttcagaggaggtgtgtttatctatcgatcatcctcagaaggtcttaattatgggtgaagctcttgacctgggaacctgtaaagccaagaagaagaatggagagccgtgcacgcagactgtgaatttgcgtgactgtgagtactgtcagtaccatgtccaggctcagtacaagaagctcagtgcaaagcgtgcggatctgcagtccaccttctctggaggacgaattccaaagaagtttgcccgcagaggcaccagcctcaaagaacggctgtgccaagatggcttttactacggaggggtttcttctgcctcgtatgcagcttcaattgcagcagctgtggctcctaagaagaagattcaaaccactctgagtaatctggttgttaagggcacaaacttgatcatccaggaaacacggcaaaaactcggaataccccagaagagcctgtcttgctctgaggagttcaaggaactgatggacctgccgacgtgtggagccaggaacttaaaacaacatttagccaaagcctcagcttcagggattatggggagcccaaaaccagccatcaagtccatctcggcctcagcactcttgaagcaacagaagcagcggatgttggagatgaggagaaggaaatcagaagaaatacagaagcgatttctgcagagctcaagtgaagttgagagcccagctgtgccatcttcatcaagacagccccctgctcagcctccacggacaggatccgagttccccaggctggagggagccccggccacaatgacgcccaagctggggcgaggtgtcttggaaggagatgatgttctcttttatgatgagtcaccaccaccaagaccaaaactgagtgctttagcagaagccaaaaagttagctgctatcaccaaattaagggcaaaaggccaggttcttacaaaaacaaacccaaacagcattaagaagaaacaaaaggaccctcaggacatcctggaggtgaaggaacgtgtagaaaaaaacaccatgttttcttctcaagctgaggatgaattggagcctgccaggaaaaaaaggagagaacaacttgcctatctggaatctgaggaatttcagaaaatcctaaaagcaaaatcaaaacacacaggcatcctgaaagaggccgaggctgagatgcaggagcgctactttgagccactggtgaaaaaagaacaaatggaagaaaagatgagaaacatcagagaagtgaagtgccgtgtcgtgacatgcaagacgtgcgcctatacccacttcaagctgctggagacctgcgtcagtgagcagcatgaataccactggcatgatggtgtgaagaggtttttcaaatgtccctgtggaaacagaagcatctccttggacagactcccgaacaagcactgcagtaactgtggcctctacaaatgggaacgggacggaatgctaaaggtatgccatttgcgtactaatttttgactccttttagtgacccatgctaataatgtggaaccatctcctattaaaatattttcatttttctaggaaaagactggtccaaagataggaggagaaactctgttaccaagaggagaagaacatgctaaatttctgaacagccttaaataacccgaacttcagacattttcccacagacttcctggcctcctgtgactctggaaagcaaaggattggctgtgtattgtccattgattcctgattgacgccgtcaaaaacaaatgcttgttaagcccataagctttgcctgcttactttctgccattgggttggtttgataccacatttaacattgacatttaagtggaaaaccaagttatcattgtcttttctaagctcagtgtggatgattgcattacttcattcactgaagtttttgcccaaaaattggaaggtaaacagagagctatgtttctgtatcttttggttatagagtgttcacttctttatcataacaaaattctagtgtttatacgaacacccagaggcaaaagaatttggcttaattctcactccaggtaagtagcttaacttctgggcttcagttttctcatctgtaaaatcaggaagattggactaagtgatcctgaaatgtattttttagcactggatttctacaaataataaaactttcccatctagataatgatgatcacatagtcttgatgtacggacattaaaagccagatttcttcattcaattctgttatctctgttttactctttgaaattgatcaagccactgaatcactttgcatttcagtttatatatagagagagaaagaaggctgtctgctcttacattattgtggagccctgtgatagaaatatgtaaaatctcatattattttttttttaatttttttattttttatgacagggtctcactatgtcaccctggctggagtgcagtagtgcgatcgcggcacactgcagccttggcttccctgggctcaagcagtcctcccacctcagtctcccaaatagctaggactacaggcgtgcgtgaccaagcccagctaatttttgcattttttgtagagatggggttttgccatgttgctcaggctggtctcaaactcctgagcactagcaatccacccacctctgtttccaaaaaaaaaaaaaaaatgaaaggtcaacccctatgcaaattaccacagcaaaggtttcattcaggagattcttccatctgggcaacctggttttccaaatatcatttgacctaagtgaatgttgatactagctaaagattgggtaaattggttgaattattgtattgaagcttgagctgtagctaaaagtaatttaggtttcccctaagatgttattatgttagggacataacacttttgggaggttgttgtgggagatggttgatttaggttttcaaaagctagaaataaaatttacatgccttagatttcataaaattctgctctaattgggtggaaggtgctgtatctaacttgtgttcctcctaaggttatgtcctaataactattcttttaggagtatacttctactttatagaaggttgcttttctttttaattttttctaacaaagaaaagaataaagtatttattaataagaaccagaaagcacttgaaactgatgtttttaatggctcatttagggtagatttatttatctcattaacttaaaacagctatgtgtatgaaataggtcacaacagaacttgaacaccaggttggtgtctgagcaatccctttcttatgggaaaaacaatgttcttgtttgaacagagggtatcattgcagtcagtattcacgtgtatattgttatataagttgtataatatgcttgtaaaggctgagggtgagctgtatctggatgcctttttacaatttgattttaacttttaaaataaatttaaaacataaaaaaaaaaaaaa

SEQ ID NO: 1100 - protein, 855 aa, Homo sapien
MDEEEDNLSLLTALLEENESALDCNSEENNFLTRENGEPDAFDELFDADGDGESYTEEADDGETGETRDEKENLATLFGDMEDLTDEEEVPASQSTENRVLPAPAPRREKTNEELQEELRNLQEQMKALQEQLKVTTIKQTASPARLQKSPEKSPRPPLKERRVQRIQESTCFSAELDVPALPRTKRVARTPKPSPPDPKSSSSRMTSAPSQPLQTISRNKPSGITRGQIVGTPGSSGETTQPICVEAFSGLRLRRPRVSSTEMNKKMTGRKLIRLSQIKEKMAREKLEEIDWVTFGVILKKVTPQSVNSGKTFSIWKLNDLRDLTQCVSLFLFGEVHKALWKTEQGTVVGILNANPMKPKDGSEEVCLSIDHPQKVLIMGEALDLGTCKAKKKNGEPCTQTVNLRDCEYCQYHVQAQYKKLSAKRADLQSTFSGGRIPKKFARRGTSLKERLCQDGFYYGGVSSASYAASIAAAVAPKKKIQTTLSNLVVKGTNLIIQETRQKLGIPQKSLSCSEEFKELMDLPTCGARNLKQHLAKASASGIMGSPKPAIKSISASALLKQQKQRMLEMRRRKSEEIQKRFLQSSSEVESPAVPSSSRQPPAQPPRTGSEFPRLEGAPATMTPKLGRGVLEGDDVLFYDESPPPRPKLSALAEAKKLAAITKLRAKGQVLTKTNPNSIKKKQKDPQDILEVKERVEKNTMFSSQAEDELEPARKKRREQLAYLESEEFQKILKAKSKHTGILKEAEAEMQERYFEPLVKKEQMEEKMRNIREVKCRVVTCKTCAYTHFKLLETCVSEQHEYHWHDGVKRFFKCPCGNRSISLDRLPNKHCSNCGLYKWERDGMLKVCHLRTNF

SEQ ID NO: 1101 - DNA, 1185 bp, Homo sapien
accgtcttccgccgcacgtggattcagcgcgatgcccaaatccaagcgcgacaagaaagtctccttaaccaaaactgccaagaaaggcttggaattgaaacaaaacctgatagaagagcttcggaaatgtgtggacacctacaagtaccttttcatcttctctgtggccaacatgaggaacagcaagctgaaggacatccggaacgcctggaagcacagccggatgttctttggcaaaaacaaggtgatgatggtggccttgggtcggagcccatctgatgaatacaaagacaacctgcaccaggtcagcaaaaggttgaggggtgaggtgggtctcctgttcaccaaccgcacaaaggaagaggtgaatgagtggttcacgaaatacacagaaatggactacgcccgagctggtaacaaagcagctttcactgtgagcctggatccagggcccctggagcagttcccccactccatggagccacagctcaggcagctgggcctgcccaccgccctcaagagaggtgtggtgactctgctgtctgactacgaggtgtgcaaggagggcgatgtgctgaccccagagcaggctcgcgtcctgaagctttttgggtatgagatggctgaattcaaggtgaccatcaaatacatgtgggattcacagtcgggaaggttccagcagatgggagacgacttgccagagagcgcatctgagtccacagaagagtcagactcagaagatgatgactgaaagggactcgggactgaaggtctcctggaagcttctgggtctcactggaccatcaggactgctgccgcccctctggagagagcagctttttatttgtctgtagacagggaacatgatgggcactgacctcctgtaaagaataaaactgtgggccgggcgcggtggctcacgcctggaatcccagcactttgggaagccgaggtgggcagatcataaggtcaggagattaagaccatcctggctaacacggtgaaaccccgtctctactaaaaatagaaaaaaaaactagttgggcatagtggcatgtgcctgtagtcccagctactcaggaggctgaggcaggagaatcacttgaacccgggaggtggaggttgccgtgagttgagattggaccactgctctccagcctgggcaacagagtaaaactctgtccc

SEQ ID NO: 1102 - protein, 239 aa, Homo sapien
MPKSKRDKKVSLTKTAKKGLELKQNLIEELRKCVDTYKYLFIFSVANMRNSKLKDIRNAWKHSRMFFGKNKVMMVALGRSPSDEYKDNLHQVSKRLRGEVGLLFTNRTKEEVNEWFTKYTEMDYARAGNKAAFTVSLDPGPLEQFPHSMEPQLRQLGLPTALKRGVVTLLSDYEVCKEGDVLTPEQARVLKLFGYEMAEFKVTIKYMWDSQSGRFQQMGDDLPESASESTEESDSEDDD

SEQ ID NO: 1103 - DNA, 1377 bp, Homo sapien
gaggcgggaggatgaagttgattgactatggtctctccggctaccaggaagagtctgccgaaggtgaaggccatggacttcatcacctccacagccatcctgcccctgctgttcggctgcctgggcgtcttcggcctcttccggctgctgcagtgggtgcgcgggaaggcctacctgcggaatgctgtggtggtgatcacaggcgccacctcagggctgggcaaagaatgtgcaaaagtcttctatgctgcgggtgctaaactggtgctctgtggccggaatggtggggccctagaagagctcatcagagaactcaccgcttctcatgccaccaaggtgcagacacacaagccttacttggtgaccttcgacctcacagactctggggccatagttgcagcagcagctgagatcctgcagtgctttggctatgtcgacatacttgtcaacaatgctgggatcagctaccgtggtaccatcatggacaccacagtggatgtggacaagagggtcatggagacaaactactttggcccagttgctctaacgaaagcactcctgccctccatgatcaagaggaggcaaggccacattgtcgccatcagcagcatccagggcaagatgagcattccttttcgatcagcatatgcagcctccaagcacgcaacccaggctttctttgactgtctgcgtgccgagatggaacagtatgaaattgaggtgaccgtcatcagccccggctacatccacaccaacctctctgtaaatgccatcaccgcggatggatctaggtatggagttatggacaccaccacagcccagggccgaagccctgtggaggtggcccaggatgttcttgctgctgtggggaagaagaagaaagatgtgatcctggctgacttactgccttccttggctgtttatcttcgaactctggctcctgggctcttcttcagcctcatggcctccagggccagaaaagagcggaaatccaagaactcctagtactctgaccagccagggccagggcagagaagcagcactcttaggcttgcttactctacaagggacagttgcatttgttgagactttaatggagatttgtctcacaagtgggaaagactgaagaaacacatctcgtgcagatctgctggcagaggacaatcaaaaacgacaacaagcttcttcccagggtgaggggaaacacttaaggaataaatatggagctggggtttaacactaaaaactagaaataaacatctcaaacagtaagagttgtagtcttccaggactagaaccttgtgtcctttgaattctcgccctgccagctcctagaaatagtttcaatcttggaatcagatgttatgtcacctgaaa

SEQ ID NO: 1104 - DNA, 2229 bp, Homo sapien
ggcacgagggccaggaacgccagccgttcacgcgttcggtcctccttggctgactcaccgccctcgccgccgcaccatggacgcccccaggcaggtggtcaactttgggcctggtcccgccaagctgccgcactcagtgttgttagagatacaaaaggaattattagactacaaaggagttggcattagtgttcttgaaatgagtcacaggtcatcagattttgccaagattattaacaatacagagaatcttgtgcgggaattgctagctgttccagacaactataaggtgatttttctgcaaggaggtgggtgcggccagttcagtgctgtccccttaaacctcattggcttgaaagcaggaaggtgtgcggactatgtggtgacaggagcttggtcagctaaggccgcagaagaagccaagaagtttgggactataaatatcgttcaccctaaacttgggagttatacaaaaattccagatccaagcacctggaacctcaacccagatgcctcctacgtgtattattgcgcaaatgagacggtgcatggtgtggagtttgactttatacccgatgtcaagggagcagtactggtttgtgacatgtcctcaaacttcctgtccaagccagtggatgtttccaagtttggtgtgatttttgctggtgcccagaagaatgttggctctgctggggtcaccgtggtgattgtccgtgatgacctgctggggtttgccctccgagagtgcccctcggtcctggaatacaaggtgcaggctggaaacagctccttgtacaacacgcctccatgtttcagcatctacgtcatgggcttggttctggagtggattaaaaacaatggaggtgccgcggccatggagaagcttagctccatcaaatctcaaacaatttatgagattattgataattctcaaggattctacgtttgtccagtggagccccaaaatagaagcaagatgaatattccattccgcattggcaatgccaaaggagatgatgctttagaaaaaagatttcttgataaagctcttgaactcaatatgttgtccttgaaagggcataggtctgtgggaggcatccgggcctctctgtataatgctgtcacaattgaagacgttcagaagctggccgccttcatgaaaaaatttttggagatgcatcagctatgaacacatcctaaccaggatatactctgttcttgaacaacatacaaagtttaaagtaacttggggatggctacaaaaagttaacacagtatttttctcaaatgaacatgtttattgcagattcttcttttttgaaagaacaacagcaaaacatccacaactctgtaaagctggtgggacctaatgtcaccttaattctgacttgaactggaagcattttaagaaatcttgttgcttttctaacaaattcccgcgtattttgcctttgctgctactttttctagttagatttcaaacttgcctgtggacttaataatgcaagttgcgattaattatttctggagtcatgggaacacacagcacagagggtaggggggccctctaggtgctgaatctacacatctgtggggtctcctgggttcagcggctgttgattcaaggtcaacattgaccattggaggagtggtttaagagtgccaggcgaagggcaaactgtagatcgatctttatgctgttattacaggagaagtgacatactttatatatgtttatattagcaaggtctgtttttaataccatatactttatatttctatacatttatatttctaataatacagttatcactgatatatgtagacacttttagaatttattaaatccttgaccttgtgcattatagcattccattagcaagagttgtaccccctccccagtcttcgccttcctctttttaagctgttttatgaaaaagacctagaagttcttgattcatttttaccattctttccataggtagaagagaaagttgattggttggttgtttttcaattatgccattaaactaaacatttctgttaaattaccctatcctttgttctctactgttttctttgtaatgtatgactacgagagtgatactttgctgaaaagtctttcccctattgtttatctattgtcagtattttatgttgaatatgtaaagaacattaaagtcctaaaacatctaaaaaaaaaaaaaaaaaaaaaaaaaaaaaaaaaaa

SEQ ID NO: 1105 - protein, 370 aa, Homo sapien; identical to SEQ ID NO: 661

SEQ ID NO: 1106 - DNA, 2735 bp, Homo sapien; identical to SEQ ID NO: 953

SEQ ID NO: 1107 - protein, 321 aa, Homo sapien; identical to SEQ ID NO: 954

SEQ ID NO: 1108 - DNA, 3443 bp, Homo sapien
gtgctttactgcgcgctctggtactgctgtggctccccgtcctggtgcgggacctgtgccccgcgcttcagccctccccgcacagcctactgattcccctgccgcccttgctcacctcctgctcgccatggagtcgctggttttcgcgcggcgctccggccccactccctcggccgcagagctagcccggccgctggcggaagggctgatcaagtcgcccaagcccctaatgaagaagcaggcggtgaagcggcaccaccacaagcacaacctgcggcaccgctacgagttcctggagaccctgggcaaaggcacctacgggaaggtgaagaaggcgcgggagagctcggggcgcctggtggccatcaagtcaatccggaaggacaaaatcaaagatgagcaagatctgatgcacatacggagggagattgagatcatgtcatcactcaaccaccctcacatcattgccatccatgaagtgtttgagaacagcagcaagatcgtgatcgtcatggagtatgccagccggggcgacctttatgactacatcagcgagcggcagcagctcagtgagcgcgaagctaggcatttcttccggcagatcgtctctgccgtgcactattgccatcagaacagagttgtccaccgagatctcaagctggagaacatcctcttggatgccaatgggaatatcaagattgctgacttcggcctctccaacctctaccatcaaggcaagttcctgcagacattctgtgggagccccctctatgcctcgccagagattgtcaatgggaagccctacacaggcccagaggtggacagctggtccctgggtgttctcctctacatcctggtgcatggcaccatgccctttgatgggcatgaccataagatcctagtgaaacagatcagcaacggggcctaccgggagccacctaaaccctctgatgcctgtggcctgatccggtggctgttgatggtgaaccccacccgccgggccaccctggaggatgtggccagtcactggtgggtcaactggggctacgccacccgagtgggagagcaggaggctccgcatgagggtgggcaccctggcagtgactctgcccgcgcctccatggctgactggctccggcgttcctcccgccccctcctggagaatggggccaaggtgtgcagcttcttcaagcagcatgcacctggtgggggaagcaccacccctggcctggagcgccagcattcgctcaagaagtcccgcaaggagaatgacatggcccagtctctccacagtgacacggctgatgacactgcccatcgccctggcaagagcaacctcaagctgccaaagggcattctcaagaagaaggtgtcagcctctgcagaaggggtacaggaggaccctccggagctcagcccaatccctgcgagcccagggcaggctgccccgctgctccccaagaagggcattctcaagaagccccgacagcgcgagtctggctactactcctctcccgagcccagtgaatctggggagctcttggacgcaggcgacgtgtttgtgagtggggatcccaaggagcagaagcctccgcaagcttcagggctgctcctccatcgcaaaggcatcctcaaactcaatggcaagttctcccagacagccttggagctcgcggcccccaccaccttcggctccctggatgaactcgccccacctcgccccctggcccgggccagccgaccctcaggggctgtgagcgaggacagcatcctgtcctctgagtcctttgaccagctggacttgcctgaacggctcccagagcccccactgcggggctgtgtgtctgtggacaacctcacggggcttgaggagcccccctcagagggccctggaagctgcctgaggcgctggcggcaggatcctttgggggacagctgcttttccctgacagactgccaggaggtgacagcgacctaccgacaggcactgagggtctgctcaaagctcacctgagtggagtaggcattgccccagcccggtcaggctctcagatgcagctggttgcaccccgaggggagatgccttctcccccacctcccaggacctgcatcccagctcagaaggctgagagggtttgcagtggagccctgagcagggctggatatgggaagtaggcaaatgaaatgcgccaagggttcagtgtctgtcttcagccctgctgaacgaagaggatactaaagagaggggaacgggaatgcccgcgacagagtccacattgcctgtttcttgtgtacatgggggggccacagagacctggaaagagaactctcccagggcccatctcctgcatcccatgaatactctgtacacatggtgccttctaaggacagctccttccctactcattccctgcccaagtggggccagacctctttacacacacattcccgttcctaccaaccaccagaactggatggtggcacccctaatgtgcatgaggcatcctgggaatggtctggagtaacgcttcgttatttttatttttatttttatttatttatttatttttttgagacggagtttcgctcttggtgcccaggctagagtgcaatggcgcgatctcagctcacctcaacctccgcctcccgggttcaagcgattctcctgcctcagcctccctagtagctgggattacaggcgcccgccaccatgcccggctaattttgtatttttagtagagacagggtttctccatgttggtcaggctggtctcaaactcccgacctcaggtgatccacccacctcggcctcccaaagtgctgggattacaggcgtgagccaccgcgccccacctaacccttccttatttagcctaggagtaagagaacacaatctctgtttcttcaatggttctcttcccttttccatcctccaaacctggcctgagcctcctgaagttgctgctgtgaatctgaaagacttgaaaagcctccgcctgctgtgtggacttcatctcaaggggcccagcctcctctggactccaccttggacctcagtgactcagaacttctgcctctaagctgctctaaagtccagactatggatgtgttctctaggccttcaggactctagaatgtccatatttatttttatgttcttggctttgtgttttaggaaaagtgaatcttgctgttttcaataatgtgaatgctatgttctgggaaaatccactatgacatctaagttttgtgtacagagagatatttttgcaactatttccacctcctcccacaaccccccacactccactccacactcttgagtctctttacctaatggtctctacctaatggacctccgtggccaaaaagtaccattaaaaccagaaaggtgattggaaaaaaaaaaaaaaaaaaaaaaaaaaaaaaaaaaaaaaaaaaaa

SEQ ID NO: 1109 - protein, 628 aa, Homo sapien
MESLVFARRSGPTPSAAELARPLAEGLIKSPKPLMKKQAVKRHHHKHNLRHRYEFLETLGKGTYGKVKKARESSGRLVAIKSIRKDKIKDEQDLMHIRREIEIMSSLNHPHIIAIHEVFENSSKIVIVMEYASRGDLYDYISERQQLSEREARHFFRQIVSAVHYCHQNRVVHRDLKLENILLDANGNIKIADFGLSNLYHQGKFLQTFCGSPLYASPEIVNGKPYTGPEVDSWSLGVLLYILVHGTMPFDGHDHKILVKQISNGAYREPPKPSDACGLIRWLLMVNPTRRATLEDVASHWWVNWGYATRVGEQEAPHEGGHPGSDSARASMADWLRRSSRPLLENGAKVCSFFKQHAPGGGSTTPGLERQHSLKKSRKENDMAQSLHSDTADDTAHRPGKSNLKLPKGILKKKVSASAEGVQEDPPELSPIPASPGQAAPLLPKKGILKKPRQRESGYYSSPEPSESGELLDAGDVFVSGDPKEQKPPQASGLLLHRKGILKLNGKFSQTALELAAPTTFGSLDELAPPRPLARASRPSGAVSEDSILSSESFDQLDLPERLPEPPLRGCVSVDNLTGLEEPPSEGPGSCLRRWRQDPLGDSCFSLTDCQEVTATYRQALRVCSKLT

SEQ ID NO: 1110 - DNA, 2071 bp, Homo sapien
ggcacgaggcctgggtcccgtcacatccttcttgctcaaccactgggtgcacaggatggaaacttctattccctctctggaagacagcgcgtggcttggcttcacagagttgtggctggagaccgaagcagcccctttctcaggcttactgtcaccagtctgtctgtgttaggggagaggggagtccgctctgtcctgaaggcccagagatggaaggacaagtggtaggccgggtgttcaggctcttccaacgccgactgcttcaactccgagcaggaccaccccaggacaattcaggggaagctttaaaggaaccagaaagggcccaggagcactctttgcccaactttgctggggggcagcacttctttgaataccttcttgtggtttctctcaaaaagaagcgttcagaggatgattacgagcctataatcacctaccaatttcccaagcgggagaacctgcttcggggtcagcaggaggaggaggagcggctgctcaaagctatccccttgttctgcttcccagatgggaatgagtgggcatcactcaccgagtatcccagggagaccttctccttcgttctgaccaatgtggatgggagcagaaagattggatactgcaggcgcctcttgcctgccggccctggccctcgccttcccaaagtgtactgcatcatcagctgcatcggctgcttcggcttgttctccaagatcctggatgaagtggagaagagacatcagatctccatggctgtcatctacccgttcatgcagggcctccgagaggcagccttccctgctcctgggaagactgtcactctcaagagcttcatccccgactcaggcactgagttcatttcactgacacggcccctggactcccacctagaacatgtggattttagttctctattgcactgtctcagttttgaacagatacttcagatctttgcctctgccgtgctggagagaaaaatcatcttcctggcggaaggtctcagcaccttgtctcagtgcatccatgctgctgccgcactgctctaccccttcagctgggcgcacacctacatccctgttgtccctgagagccttctggccaccgtctgctgccccacccccttcatggttggagtacaaatgcgcttccagcaggaggtcatggacagccctatggaagaggtcctgctggtcaatctttgtgaaggaaccttcttaatgtcggttggtgatgaaaaagacatcctgccaccgaagcttcaggatgacatcttagactctcttggtcaggggatcaatgagttaaagactgcagaacaaatcaacgagcatgtttcaggcccctttgtgcagttctttgtcaagattgtgggccattatgcttcctatatcaagcgggaggcaaatgggcaaggccacttccaagaaagatccttctgtaaggctctgacctccaagaccaaccgccgatttgtgaagaagtttgtgaagacacagctcttctcacttttcatccaggaagccgagaagagcaagaatcctcctgcaggctatttccaacagaaaatacttgaatatgaggaacagaagaaacagaagaaaccaagggaaaaaactgtgaaataagagctgtggtgaataagaatgactagagctacacaccatttctggacttcagcccctgccagtgtggcaggatcagcaaaactgtcagctcccaaaatccatatcctcactctgagtcttggtatccaggtattgcttcaaactggtgtctgagatttggatccctggtattgatttctcaggactttggagggctctgacaccatgctcacagaactgggctcagagctccattttttgcagaggtgacacaggtaggaaacagtagtacatgtgttgtagacacttggttagaagctgctgcaactgccctctcccatcattataacatcttcaacacagaacacactttgtggtcgaaaggctcagcctctctacatgaagtctgtggacatgtaaggacgagagtaaagaggaaaatcttataaaaaaaaaaaaaaaaaaaa

SEQ ID NO: 1111 - protein, 471 aa, Homo sapien
MEGQVVGRVFRLFQRRLLQLRAGPPQDNSGEALKEPERAQEHSLPNFAGGQHFFEYLLVVSLKKKRSEDDYEPIITYQFPKRENLLRGQQEEEERLLKAIPLFCFPDGNEWASLTEYPRETFSFVLTNVDGSRKIGYCRRLLPAGPGPRLPKVYCIISCIGCFGLFSKILDEVEKRHQISMAVIYPFMQGLREAAFPAPGKTVTLKSFIPDSGTEFISLTRPLDSHLEHVDFSSLLHCLSFEQILQIFASAVLERKIIFLAEGLSTLSQCIHAAAALLYPFSWAHTYIPVVPESLLATVCCPTPFMVGVQMRFQQEVMDSPMEEVLLVNLCEGTFLMSVGDEKDILPPKLQDDILDSLGQGINELKTAEQINEHVSGPFVQFFVKIVGHYASYIKREANGQGHFQERSFCKALTSKTNRRFVKKFVKTQLFSLFIQEAEKSKNPPAGYFQQKILEYEEQKKQKKPREKTVK

SEQ ID NO: 1112 - DNA, 2192 bp, Homo sapien
tccctgtcctgcgcccgcgcgccccgggagcctacccagcacgcgctccgcgcccactggttccctccagccgccgccgtccagccgagtccccactccggagtcgccgctgccgcggggacatggtcctctgcgttcaggggtgagcacccccttgtaagctcagggctactgttgggtgtcagggaacaaagttttagactgctgcgctccaaagcgggcacacacatgtacctagaacacaccagccactgtccccaccatgatgatgacacagccatggacacacccctgcccagacctcgtcctttgctggctgtggagcggactgggcagcggcccctgtgggccccgtccctggaactgcccaagccagtcatgcagcccttgcctgctggggccttcctcgaggaggtggcagagggtaccccagcccagacagagagtgagccaaaggtgctggacccagaggaggatctgctgtgcatagccaagaccttctcctaccttcgggaatctggctggtattggggttccattacggccagcgaggcccgacaacacctgcagaagatgccagaaggcacgttcttagtacgtgacagcacgcaccccagctacctgttcacgctgtcagtgaaaaccactcgtggccccaccaatgtacgcattgagtatgccgactccagcttccgtctggactccaactgcttgtccaggccacgcatcctggcctttccggatgtggtcagccttgtgcagcactatgtggcctcctgcactgctgatacccgaagcgacagccccgatcctgctcccaccccggccctgcctatgcctaaggaggatgcgcctagtgacccagcactgcctgctcctccaccagccactgctgtacacctaaaactggtgcagccctttgtacgcagaagcagtgcccgcagcctgcaacacctgtgccgccttgtcatcaaccgtctggtggccgacgtggactgcctgccactgccccggcgcatggccgactacctccgacagtaccccttccagctctgactgtacggggcaatctgcccaccctcacccagtcgcaccctggaggggacatcagccccagctggacttgggcccccactgtccctcctccaggcatcctggtgcctgcatacctctggcagctggcccaggaagagccagcaagagcaaggcatgggagaggggaggtgtcacacaacttggaggtaaatgcccccaggccgcatgtggcttcattatactgagccatgtgtcagaggatggggagacaggcaggaccttgtctcacctgtgggctgggcccagacctccactcgcttgcctgccctggccacctgaactgtatgggcactctcagccctggtttttcaatccccagggtcgggtaggacccctactggcagccagcctctgtttctgggaggatgacatgcagaggaactgagatcgacagtgactagtgaccccttgttgaggggtaagccaggctaggggactgcacaattatacactatttatttatttattctccttggggttggtgtcaggggcgagccaaccccacctctatgccctgagccctggtagtccagagaccccaactctgccctggcttctctggttcttccctgtggaaagcccatcctgagacatcttgctggaaccaaggcaatcctggatgtcctggtactgacccacccgtctgtgaatgtgtccactctcttctgcccccagccatatttggggaggatggacaactacaataggtaagaaaatgcagccggagcctcagtccccagcagagcctgtgtctcaccccctcacaggacagagctgtatctgcatagagctggtctcactgtggcgcaggccccggggggagtgcctgtgctgtcaggaagagggggtgctggtttgagggccaccactgcagttctgctaggtctgcttcctgcccaggaaggtgcctgcacatgagaggagagaaatacacgtctgataagacttcatgaaataataattatagcaaagaacagtttggtggtcttttctcttccactgatttttctgtaatgacattatacctttattacctctttattttattacctctataataaaatgatacctttttcatgtaaaaaaaaaaaaaaaaa

SEQ ID NO: 1113 - protein, 258 aa, Homo sapien
MVLCVQGPRPLLAVERTGQRPLWAPSLELPKPVMQPLPAGAFLEEVAEGTPAQTESEPKVLDPEEDLLCIAKTFSYLRESGWYWGSITASEARQHLQKMPEGTFLVRDSTHPSYLFTLSVKTTRGPTNVRIEYADSSFRLDSNCLSRPRILAFPDVVSLVQHYVASCTADTRSDSPDPAPTPALPMPKEDAPSDPALPAPPPATAVHLKLVQPFVRRSSARSLQHLCRLVINRLVADVDCLPLPRRMADYLRQYPFQL

SEQ ID NO: 1114 - DNA, 2330 bp, Homo sapien
  Unsure 2: Unknown base
  Unsure 14: Unknown base
gnccctcgacggcntgcagccgggagagccatggcgggggccgcagcgggcggcagaggcggaggtgcctgggggccggggcgcggaggggccggggggctccggcggggctgctctcccccagcccccgccggctccccccgggctgggctgcagccgctcagggccacgatccccttccagctgcagcagccgcaccagcgccgggacgggggtggccgtgcagccagcgtcccatgctcggtggccccagaaaagtcagtgtgtaggcctcagccacttcaggtccggcgtacattctccctggacaccatcctcagctcctaccttctgggccagtggccacgagatgctgatggggccttcacctgctgcaccaatgacaaggccacccagacgcccctgtcctggcaagagctagaaggtgagcgtgccagttcctgtgcacacaagcgctcagcatcctggggcagcacagaccaccgaaaagagatttccaagttgaagcaacaactgcagaggacgaagctgagccgcagtgggaaagagaaggagcgaggttcaccactcctaggggaccacgcagtgcggggagcactgagggcgtcccctcccagcttcccctcagggtcccctgtcttgcgactcagcccctgcctgcacaggagcctggaagggctcaaccaagagctggaggaggtatttgtgaaggagcagggagaagaggagctgctgaggatccttgatatccctgatgggcaccgggccccagctcctccccagagtggcagctgtgatcatcccctcctcctcctggagcctggcaaccttgccagctctccttccatgtccttggcatctccccagccttgtggcctggccagtcatgaggaacatcggggtgccgccgaggagctggcatccacccccaacgacaaagcctcctctccaggacacccagcctttcttgaagatggcagcccatctccagtccttgcctttgctgcctcccctcgacctaatcatagctacatcttcaaacgggagcccccagaaggctgtgagaaagtgcgtgtgtttgaagaagccacgtctccaggtcctgacctggccttcctgacttcctgtcctgacaagaacaaagtccatttcaacccgactggctcagccttctgccccgtcaacctgatgaagcccctcttccccggcatgggcttcatcttccgtaactgcccctcaaacccgggatctccccttcccccggccagccccaggccaccacctcggaaggatccggaagcctccaaggcctccccactgccattcgagccatggcagcgcaccccaccatcagaagagcctgtgcttttccagagctccctgatggtctgagggtcccacccctgccccactttaccatagagaccagtgccttggtggcaggtccctccccaggtcccctgagatggggtatggaggggcccttccctctcggccttcgagcactttctttcacttactgtgtcaaagccctgggtcctctttttgatgggcaccggcccctctgaacgtgatgggacctgccttctccactagtagctgggcagctcacaattcacacctgtgtacctgccacatccctcacttggtggaaaacacccagaaggtcttgagtcccccacccctgggtgtcagtccaaatgactgtataggaggcccttatttttgtcacagagcaagctggccatgaacgaaggagagaagacgccacagatttccttccctctcctccaggagaccataagatagatcccccatcctctcagccctattcccatgcctccctctcattggaggagctgaccaaagcagccctaacgggccataacacttgaccaattcagctgctggcagagggaggaaacaagtgttttcccaagtggcattttcatctcgctttcaccctgactaaagattgtcttaagtagcagcccagcccgcccagccccaggtgggtagtggggaggagagctggcattcctccaggtggcaaatggcgactctatactctccgcccgccccagggctggatggattagaaaaatccctatttttcttgtatcgatgtagagactctattttctcccaaagacactatttttgcagctgtttgaagtttgtatattttccgtactgcagagcttacacaaaattgaagaatgttaatgttcgagttttcttatcttgtgtttagaggttgttttttgcagatcttggtgttaatagaccaaataaataaataaatattcccagcaaaaaaaaaagtcgac

SEQ ID NO: 1115 - protein, 453 aa, Homo sapien
MAGAAAGGRGGGAWGPGRGGAGGLRRGCSPPAPAGSPRAGLQPLRATIPFQLQQPHQRRDGGGRAASVPCSVAPEKSVCRPQPLQVRRTFSLDTILSSYLLGQWPRDADGAFTCCTNDKATQTPLSWQELEGERASSCAHKRSASWGSTDHRKEISKLKQQLQRTKLSRSGKEKERGSPLLGDHAVRGALRASPPSFPSGSPVLRLSPCLHRSLEGLNQELEEVFVKEQGEEELLRILDIPDGHRAPAPPQSGSCDHPLLLLEPGNLASSPSMSLASPQPCGLASHEEHRGAAEELASTPNDKASSPGHPAFLEDGSPSPVLAFAASPRPNHSYIFKREPPEGCEKVRVFEEATSPGPDLAFLTSCPDKNKVHFNPTGSAFCPVNLMKPLFPGMGFIFRNCPSNPGSPLPPASPRPPPRKDPEASKASPLPFEPWQRTPPSEEPVLFQSSLMV

SEQ ID NO: 1116 - DNA, 2712 bp, Homo sapien
gtcatgttcttcgcgccctggtgtggacactgccagcggctgcagccgacttggaatgacctgggagacaaatacaacagcatggaagatgccaaagtctatgtggctaaagtggactgcacggcccactccgacgtgtgctccgcccagggggtgcgaggataccccaccttaaagcttttcaagccaggccaagaagctgtgaagtaccagggtcctcgggacttccagacactggaaaactggatgctgcagacactgaacgaggagccagtgacaccagagccggaagtggaaccgcccagtgcccccgagctcaagcaagggctgtatgagctctcagcaagcaactttgagctgcacgttgcacaaggcgaccactttatcaagttcttcgctccgtggtgtggtcactgcaaagccctggctccaacctgggagcagctggctctgggccttgaacattccgaaactgtcaagattggcaaggttgattgtacacagcactatgaactctgctccggaaaccaggttcgtggctatcccactcttctctggttccgagatgggaaaaaggtggatcagtacaagggaaagcgggatttggagtcactgagggagtacgtggagtcgcagctgcagcgcacagagactggagcgacggagaccgtcacgccctcagaggccccggtgctggcagctgagcccgaggctgacaagggcactgtgttggcactcactgaaaataacttcgatgacaccattgcagaaggaataaccttcatcaagttttatgctccatggtgtggtcattgtaagactctggctcctacttgggaggaactctctaaaaaggaattccctggtctggcgggggtcaagatcgccgaagtagactgcactgctgaacggaatatctgcagcaagtattcggtacgaggctaccccacgttattgcttttccgaggagggaagaaagtcagtgagcacagtggaggcagagaccttgactcgttacaccgctttgtcctgagccaagcgaaagacgaactttaggaacacagttggaggtcacctctcctgcccagctcccgcaccctgcgtttaggagttcagtcccacagaggccactgggttcccagtggtggctgttcagaaagcagaacatactaagcgtgaggtatcttctttgtgtgtgtgttttccaagccaacacactctacagattctttattaaatgtgtaactcatggtcactgtgtaaacattttcagtggcgatatatcccctttgaccttctcttgatgaaatttacatggtttcctttgagactaaaatagcgttgagggaaatgaaattgctggactatttgtggctcctgagttgagtgattttggtgaaagaaagcacatccaaagcatagtttacctgcccacgagttctggaaaggtggccttgtggcagtattgacgttcctctgatcttaaggtcacagttgactcaatactgtgttggtccgtagcatggagcagattgaaatgcaaaaacccacacctctggaagataccttcacggccgctgctggagcttctgttgctgtgaatacttctctcagtgtgagaggttagccgtgatgaaagcagcgttacttctgaccgtgcctgagtaagagaatgctgatgccataactttatgtgtcgatacttgtcaaatcagttactgttcaggggatccttctgtttctcacggggtgaaacatgtctttagttcctcatgttaacacgaagccagagcccacatgaactgttggatgtcttccttagaaagggtaggcatggaaaattccacgaggctcattctcagtatctcattaactcattgaaagattccagttgtatttgtcacctggggtgacaagaccagacaggctttcccaggcctgggtatccagggaggctctgcagccctgctgaagggccctaactagagttctagagtttctgattctgtttctcagtagtccttttagaggcttgctatacttggtctgcttcaaggaggtcgaccttctaatgtatgaagaatgggatgcatttgatctcaagaccaaagacagatgtcagtgggctgctctggccctggtgtgcacggctgtggcagctgttgatgccagtgtcctctaactcatgctgtccttgtgattaaacacctctatctcccttgggaataagcacatacaggcttaagctctaagatagataggtgtttgtccttttaccatcgagctacttcccataataaccactttgcatccaacactcttcacccacctcccatacgcaaggggatgtggatacttggcccaaagtaactggtggtaggaatcttagaaacaagaccacttatactgtctgtctgaggcagaagataacagcagcatctcgaccagcctctgccttaaaggaaatctttattaatcacgtatggttcacagataattctttttttaaaaaaacccaacctcctagagaagcacaactgtcaagagtcttgtacacacaacttcagctttgcatcacgagtcttgtattccaagaaaatcaaagtggtacaatttgtttgtttacactatgatactttctaaataaactctttttttttaaaaaaaaaaaaaaaaaaaaaaaaaaaaaaaaaaaaaaaaaaaaaaaaaaac

SEQ ID NO: 1117 - protein, 324 aa, Homo sapien
MEDAKVYVAKVDCTAHSDVCSAQGVRGYPTLKLFKPGQEAVKYQGPRDFQTLENWMLQTLNEEPVTPEPEVEPPSAPELKQGLYELSASNFELHVAQGDHFIKFFAPWCGHCKALAPTWEQLALGLEHSETVKIGKVDCTQHYELCSGNQVRGYPTLLWFRDGKKVDQYKGKRDLESLREYVESQLQRTETGATETVTPSEAPVLAAEPEADKGTVLALTENNFDDTIAEGITFIKFYAPWCGHCKTLAPTWEELSKKEFPGLAGVKIAEVDCTAERNICSKYSVRGYPTLLLFRGGKKVSEHSGGRDLDSLHRFVLSQAKDEL

SEQ ID NO: 1118 - DNA, 1645 bp, Homo sapien
gcggagggaccgacggacgcacgggcgggcggccgggagccatggagcgcggccctggggccccggggcgcgggccggggtgggcttcccacggcacgacatggagacctgtggttgcgaggctccctggggctcggcttggaccgcgatggggctgggccctggcctcctaacggggctgctgtctggggcggtagctgggggggcgctctcccccctgcccgcgactcggagcacccccacccctcccctgccgggccaggccgggcggcgttgttggcgggggccccggtggaggcccggcctgggcggcgcccgccatgaatgggctgtcgctgagtgagctctgctgcctcttctgctgcccgccctgccccggccgcatcgctgccaagctcgccttcctgccgccggaggccacctactccctggtgcctgagcccgagccggggcctggtggggccggggccgcccccttggggaccctgagagcctcctcgggcgcacccgggcgctggaagctgcacctgacggagcgtgccgacttccagtacagccagcgcgagctggacaccatcgaggtcttccccaccaagagcgcccgcggcaaccgcgtctcctgcatgtatgttcgctgcgtgcctggtgccagacaaggacaccaggctcagggaggccatccccagctggcatgggtgggcaggctgggcgactccaacaacccagcgcctggtggttgcctgctgggcgagagctggggcacaggggctgccctggcctgcgggtacatccaccttctcgccaggtacacggtcctcttctcgcacggcaatgccgtggacctgggccagatgagcagcttctacattggcctgggctcccgcctccactgcaacatcttctcctacgactactccggctacggtgccagctcgggcaggccttccgagaggaacctctatgccgacatcgacgccgcctggcaggccctgcgcaccaggtacggcatcagcccggacagcatcatcctgtacgggcagagcatcggcacggtgcccaccgtggacctggcctcgcgctacgagtgtgccgcggtggtgctgcactcgccgctcacctcgggcatgcgcgtcgccttccccgacaccaagaagacctactgcttcgacgccttccctaacatcgagaaggtgtccaagatcacgtctcccgtgctcatcatccacggcacggaggacgaggtgatcgacttctcgcacgggctggcgctctacgagcgctgccccaaggcggtggagccgctgtgggtggagggcgccgggcacaacgacatcgagctctacagccagtacctggagcgcctgcgtcgcttcatctcccaggagctgcccagccagcgcgcctagcggcggccccaaccggccggacctcagcaataaggcggcccccggacctcaccccgcgccggcccccacccaggggctgcatgtggaccccccgggcggcccaggggaccccgccccgacccaggggctgtggacgatgtacaggcaacagagctacgcactcctttccttttggaagcaagaagaaaatacgtgaaaacggaaattaaagatttaaaattttaaaaaaaaaaaaaaaa

SEQ ID NO: 1119 - protein, 361 aa, Homo sapien
MNGLSLSELCCLFCCPPCPGRIAAKLAFLPPEATYSLVPEPEPGPGGAGAAPLGTLRASSGAPGRWKLHLTERADFQYSQRELDTIEVFPTKSARGNRVSCMYVRCVPGARQGHQAQGGHPQLAWVGRLGDSNNPAPGGCLLGESWGTGAALACGYIHLLARYTVLFSHGNAVDLGQMSSFYIGLGSRLHCNIFSYDYSGYGASSGRPSERNLYADIDAAWQALRTRYGISPDSIILYGQSIGTVPTVDLASRYECAAVVLHSPLTSGMRVAFPDTKKTYCFDAFPNIEKVSKITSPVLIIHGTEDEVIDFSHGLALYERCPKAVEPLWVEGAGHNDIELYSQYLERLRRFISQELPSQRA

SEQ ID NO: 1120 - DNA, 2306 bp, Homo sapien
gcgcggcccatggagtcggggctgctgcggccggcgccggtgagcgaggtcatcgtcctgcattacaactacaccggcaagctccgcggtgcgcgctaccagccgggtgccggcctgcgcgccgacgccgtggtgtgcctggcggtgtgcgccttcatcgtgctagagaatctagccgtgttgttggtgctcggacgccacccgcgcttccacgctcccatgttcctgctcctgggcagcctcacgttgtcggatctgctggcaggcgccgcctacgccgccaacatcctactgtcggggccgctcacgctgaaactgtcccccgcgctctggttcgcacgggagggaggcgtcttcgtggcactcactgcgtccgtgctgagcctcctggccatcgcgctggagcgcagcctcaccatggcgcgcagggggcccgcgcccgtctccagtcgggggcgcacgctggcgatggcagccgcggcctggggcgtgtcgctgctcctcgggctcctgccagcgctgggctggaattgcctgggtcgcctggacgcttgctccactgtcttgccgctctacgccaaggcctacgtgctcttctgcgtgctcgccttcgtgggcatcctggccgcgatctgtgcactctacgcgcgcatctactgccaggtacgcgccaacgcgcggcgcctgccggcacggcccgggactgcggggaccacctcgacccgggcgcgtcgcaagccgcgctcgctggccttgctgcgcacgctcagcgtggtgctcctggcctttgtggcatgttggggccccctcttcctgctgctgttgctcgacgtggcgtgcccggcgcgcacctgtcctgtactcctgcaggccgatcccttcctgggactggccatggccaactcacttctgaaccccatcatctacacgctcaccaaccgcgacctgcgccacgcgctcctgcgcctggtctgctgcggacgccactcctgcggcagagacccgagtggctcccagcagtcggcgagcgcggctgaggcttccgggggcctgcgccgctgcctgcccccgggccttgatgggagcttcagcggctcggagcgctcatcgccccagcgcgacgggctggacaccagcggctccacaggcagccccggtgcacccacagccgcccggactctggtatcagaaccggctgcagactgacaccctcggcccacgactgtcttcccaagttttacagacttgttctttttacataaaggaatttgtaggaaatgcagccaaaggtgcagtcggaaaagatgcaggggaaatgtatttatgcagcgacaccccacaatgtgaacaaacagacaaaaaatctgtgccctcgtggaattgacgttctgcttgggaacacagaaaagaactcggtgatgaaataatggagatgattccagtgacaaacgacagagatggtgatggtggtcagggaagacctctctgcagaggtagtgacttgtgatgtgagctgagacctctgtcctgggaagaccaaaagaaaagcatttcaggatgagggaatggcatgcgcaaaggccctgaggctgaaatgtgcccatgtgttctaagaaatgcagcgatgctggtgtgcctggagcagggacggagggggagaatgggaggagacaaggagctgaaggagtagttcccgaaggaccttgtgggtgatatagaggacttcgcttttgctctgagtgaggtgggagccatagaagcttctaagcagaagagggacttgccctaattcaggtgatcacaggtgtcttgtggcctccatgggaggttgaaaaccacagaaggtgaaggggggctgcactgagccacaggaacaatgatggagattccagctaagcccagaccccgtggattctagatagattttagaggcagcagacagaattactgaggaattgagtgtaagagtggaataaagttatcaaggacaatgccaagggtggggcacccccaaatttgactttgggagactcagccaaatcctatctggtaataaaatttcttttttatttttcttttctttctttctttctttctttctttttttttttttgagttgggatcttgtgctctgtcacccaggctggagtgcaatgggcacaattatagctcactgcagcctggaactcctgggatcaagcctggagttcctgcttcagcctccctagtagctgggactacaggcatgcaccaccatgcccagttaataaaatttcttcaaatgcaaaaaaaaaaaaaaaaaaaaa

SEQ ID NO: 1121 - protein, 398 aa, Homo sapien
MESGLLRPAPVSEVIVLHYNYTGKLRGARYQPGAGLRADAVVCLAVCAFIVLENLAVLLVLGRHPRFHAPMFLLLGSLTLSDLLAGAAYAANILLSGPLTLKLSPALWFAREGGVFVALTASVLSLLAIALERSLTMARRGPAPVSSRGRTLAMAAAAWGVSLLLGLLPALGWNCLGRLDACSTVLPLYAKAYVLFCVLAFVGILAAICALYARIYCQVRANARRLPARPGTAGTTSTRARRKPRSLALLRTLSVVLLAFVACWGPLFLLLLLDVACPARTCPVLLQADPFLGLAMANSLLNPIIYTLTNRDLRHALLRLVCCGRHSCGRDPSGSQQSASAAEASGGLRRCLPPGLDGSFSGSERSSPQRDGLDTSGSTGSPGAPTAARTLVSEPAAD

SEQ ID NO: 1122 - DNA, 4312 bp, Homo sapien
gggggcagaaaagggggcggcggactcggcttgttgtgttgctgcctgagtgccggagacggtcctgctgctgccgcagtcctgccagctgtccgacgatgtcgtcccacctagtcgagccgccgccgcccctgcacaacaataacaacaactgcgaggaaaatgagcagtctctgcccccgccggccggcctcaacagttcctgggtggagctacccatgaacagcagcaatggcaatgataatggcaatgggaaaaatggggggctggaacacgtaccatcctcatcctccatccacaatggagacatggagaagattcttttggatgcacaacatgaatcaggacagagtagttccagaggcagttctcactgtgacagcccttcgccacaagaagatgggcagatcatgtttgatgtggaaatgcacaccagcagggaccatagctctcagtcagaagaagaagttgtagaaggagagaaggaagtcgaggctttgaagaaaagtgcggactgggtatcagactggtccagtagacccgaaaacattccacccaaggagttccacttcagacaccctaaacgttctgtgtctttaagcatgaggaaaagtggagccatgaagaaagggggtattttctccgcagaatttctgaaggtgttcattccatctctcttcctttctcatgttttggctttggggctaggcatctatattggaaagcgactgagcacaccctctgccagcacctactgagggaaaggaaaagcccctggaaatgcgtgtgacctgtgaagtggtgtattgtcacagtagcttatttgaacttgagaccattgtaagcatgacccaacctaccaccctgtttttacatatccaattccagtaactctcaaattcaatattttattcaaactctgttgaggcattttactaaccttataccctttttggcctgaagacattttagaatttcctaacagagtttactgttgtttagaaatttgcaagggcttcttttccgcaaatgccaccagcagattataattttgtcagcaatgctattatctctaattagtgccaccagactagacctgtatcattcatggtataaattttactcttgcaacataactaccatctctctcttaaaacgagatcaggttagcaaatgatgtaaaagaagctttattgtctagttgttttttttcccccaagacaaaggcaagtttccctaagtttgagttgatagttattaaaaagaaaacaaaacaaaaaaaaaaggcaaggcacaacaaaaaaatatcctgggcaataaaaaaaatattttaaaccagctttggagccacttttttgtctaagcctcctaatagcgtcttttaatttataggaggcaaactgtataaatgataggtatgaaatagaataagaagtaaaatacatcagcagattttcatactagtatgttgtaatgctgtcttttctatggtgtagaatctttctttctgataaggaacgtctcaggcttagaaatatatgaaattgctttttgagatttttgcgtgtgtgtttgatattttttacgataattagctgcatgtgaatttttcatgaccttctttacattttttattttttatttctttatttttttttctctaagaagaggctttggaatgagttccaatttgtgatgttaatacaggcttcttgttttaggaagcatcacctatactctgaagcctttaaactctgaagagaattgtttcagagttattccaagcacttgtgcaacttggaaaaacagacttgggttgtgggaacagttgacagcgttctgaaaagatgccatttgtttccttctgatctctcactgaataatgtttactgtacagtcttcccaaggtgattcctgcgactgcaggcactggtcattttctcatgtagctgtcttttcagttatggtaaactcttaaagttcagaacactcaacagattccttcagtgatatacttgttcgttcatttctaaaatgtgaagctttaggaccaaattgttagaaagcatcaggatgaccagttatctcgagtagattttcttggatttcagaacatctagcatgactctgaaggataccacatgttttatatataaataattactgtttatgatatagacattgatattgactatttagagaaccgttgttaattttaaaactagcaatctataaagtgcaccaggtcaacttgaataaaaacactatgacagacaggtttgccagtttgcagaaactaactcttttctcacatcaacatttgtaaaattgatgtgttatagtggaaaataacatatagattaaacaaaatttttatcttttttcaagaatatagctggctatctttaagaaagatgatatatcctagttttgaaagtaattttcttttttctttctagcatttgatgtctaaataattttggacatctttttcctagaccatgtttctgtcttactcttaaacctggtaacacttgatttgccttctataacctatttatttcaagtgttcatatttgaatttctttgggaagaaagtaaatctgatggctcactgatttttgaaaagcctgaataaaattggaaagactggaaagttaggagaactgactagctaaactgctacagtatgcaatttctattacaattggtattacaggggggaaaagtaaaattacactttacctgaaagtgacttcttacagctagtgcattgtgctctttccaagttcagcagcagttctatcagtggtgccactgaaactgggtatatttatgatttctttcagcgttaaaaagaaacatagtgttgccctttttcttaaagcatcagtgaaattatggaaaattacttaaaacgtgaatacatcatcacagtagaatttattatgagagcatgtagtatgtatctgtagccctaacacatgggatgaacgttttactgctacacccagatttgtgttgaacgaaaacattgtggtttggaaaggagaattcaacaattaatagttgaaattgtgaggttaatgtttaaaaagctttacacctgtttacaatttggggacaaaaaggcaggcttcatttttcatatgtttgatgaaaactggctcaagatgtttgtaaatagaatcaagagcaaaactgcacaaacttgcacattggaaagtgcaacaagttcccgtgattgcagtaaaaatatttactattctaaaaaaatgagaattgaagacttagccagtcagataagttttttcatgaacccgttgtggaaattattggaattaactgagccaaagtgattatgcattcttcatctattttagttagcactttgtatcgttatatacagtttacaatacatgtataacttgtagctataaacattttgtgccattaaagctctcacaaaacttttcctgtcagtatatcatttttctgtcgcacctgttgcctgggagtttcaggcgatgaggcctcctcgcctacacacagccttccagtcatctggcttccccagcagtggagttcctaacagtgctcagggtgtgaacggtgttctgtggggacagtcaccgcagtgtgagcattcgtgagtgcctcgggactgtggcattcagagcatttgcctccaggtagtggcaggagggcgctcacgggaggagtgctcaggaagtacaggagagaagaagagtgtgccctgatggaaatgacagtgggacaccagtgaaagtggatccagaaggaactggaagttccacgtgcctggaaaacaggatggatacagaggaaactgaaaaatgtaggttagtactgaacctaattgaaatgtgtgtgccctcccaggggtcacacttcatcatatagttagctgggtttacttcttttaaaccaggaggtgatttaagatgtaaattttagacagtcaagccatctggtgagagagtaccagaggagatcaatcagttctctaggcgaggagctagggcctgtcctgggctgtcaccctgaggttggcagtggtgggccaggatacgtatgagaaacaaagcggaagtaaactggtcagaaagtgacttagagacgaaggcgtgtgtattcctttgtgtgtgtggcccgtaaaacatgggttgatcccattagttaaaggaggacaggagaagaaatggggtggtaggagcaaagagggaggatttcagttttgagtgcgttgaacatgaaatgtctgagggccttctgattggacacttactcc

SEQ ID NO: 1123 - protein, 251 aa, Homo sapien
GQKRGRRTRLVVLLPECRRRSCCCRSPASCPTMSSHLVEPPPPLHNNNNNCEENEQSLPPPAGLNSSWVELPMNSSNGNDNGNGKNGGLEHVPSSSSIHNGDMEKILLDAQHESGQSSSRGSSHCDSPSPQEDGQIMFDVEMHTSRDHSSQSEEEVVEGEKEVEALKKSADWVSDWSSRPENIPPKEFHFRHPKRSVSLSMRKSGAMKKGGIFSAEFLKVFIPSLFLSHVLALGLGIYIGKRLSTPSASTY

SEQ ID NO: 1124 - DNA, 1337 bp, Homo sapien
gcggcggactcggcttgttgtgttgctgcctgagtgccggagacggtcctgctgctgccgcagtcctgccagctgtccgacgatgtcgtcccacctagtcgagccgccgccgcccctgcacaacaacaacaacaactgcgaggaaaatgagcagtctctgcccccgccggccggcctcaacagttcctgggtggagctacccatgaacagcagcaatggcaatgataatggcaatgggaaaaatggggggctggaacacgtaccatcctcatcctccatccacaatggagacatggagaagattcttttggatgcacaacatgaatcaggacagagtagttccagaggcagttctcactgtgacagcccttcgccacaagaagatgggcagatcatgtttgatgtggaaatgcacaccagcagggaccatagctctcagtcagaagaagaagttgtagaaggagagaaggaagtcgaggctttgaagaaaagtgcggactgggtatcagactggtccagtagacccgaaaacattccacccaaggagttccacttcagacaccctaaacgttctgtgtctttaagcatgaggaaaagtggagccatgaagaaagggggtattttctccgcagaatttctgaaggtgttcattccatctctcttcctttctcatgttttggctttggggctaggcatctatattggaaagcgactgagcacaccctctgccagcacctactgagggaaaggaaaagcccctggaaatgcgtgtgacctgtgaagtggtgtattgtcacagtagcttatttgaacttgagaccattgtaagcatgacccaacctaccaccctgtttttacatatccaattccagtaaccctcaaattcaatattttattcaaactctgttgaggcattttactaaccttataccctttttggcctgaagacattttagaatttcctaacagagtttactgttgtttagaaatttgcaagggcttcttttccgcaaatgccaccagcagattataattttgtcggcaatgctattatctctaattagtgccaccagactagacctgtatcattcatggtataaattttactcttccaacataactaccatctctctcttaaaacgagatcaggttagcaaatgatgtaaaagaagctttattgtctagttgttttttttcccccaagacaaaggcaagtttccctaagtttgagttgatagttattaaaaagaaaacaaaacaaaaaaaaaaggcaaggcacaacaaaaaaatatcctgggcaataaaaaaaatattttaaaccaaaaaaaaaaaaaaaa

SEQ ID NO: 1125 - protein, 219 aa, Homo sapien
MSSHLVEPPPPLHNNNNNCEENEQSLPPPAGLNSSWVELPMNSSNGNDNGNGKNGGLEHVPSSSSIHNGDMEKILLDAQHESGQSSSRGSSHCDSPSPQEDGQIMFDVEMHTSRDHSSQSEEEVVEGEKEVEALKKSADWVSDWSSRPENIPPKEFHFRHPKRSVSLSMRKSGAMKKGGIFSAEFLKVFIPSLFLSHVLALGLGIYIGKRLSTPSASTY

SEQ ID NO: 1126 - DNA, 1182 bp, Homo sapien
gcggccggcggcgtctcctcccgggacgctgaggggcccgaggagaccgtgaggctctggcctgcagctcgcgccgccatggacgctgccgaggtcgaattcctcgccgagaaggagctggttaccattatccccaacttcagtctggacaagatctacctcatcgggggggacctggggccttttaaccctggtttacccgtggaagtgcccctgtggctggcgattaacctgaaacaaagacagaaatgtcgcctgctccctccagagtggatggatgtagaaaagttggagaagatgagggatcatgaacgaaaggaagaaacttttaccccaatgcccagcccttactacatggaacttacgaagctcctgttaaatcatgcttcagacaacatcccgaaggcagacgaaatccggaccctggtcaaggatatgtgggacactcgtatagccaaactccgagtgtctgctgacagctttgtgagacagcaggaggcacatgccaagctggataacttgaccttgatggagatcaacaccagcgggactttcctcacacaagcgctcaaccacatgtacaaactccgcacgaacctccagcctctggagagtactcagtctcaggacttctagagaaaggcctggtgcaggcggcttgctgggggatgtgagcgctcaggatgtgatgaggtactcgtggttctggagctctagaaacacttctgatgcatgaaaaatgtgtgatggtgcaaggaatggattcaggatgttgttggagaaacaagtttgtgattagtccttaaaacttagctccctgggacattcttcaattccacatctgtttctagaaaccagccctttttccccccacttttgagaaataaaaaagccttaggtaaataagtcattctccctagcagagccacttgggtctcctgcatggaagccgtcacacttgggcaggtgttcagtgactggtaggtgtagatacagcaggagtggccatgtggtccacggctttttaccccttcttgatcctgatttcttgggctgaatttagactctctcacagaggtggctcacagagaaggatggcagatggtgcagccaacaatgctgaccggtgcttatcctctaagccctgatccacaataaaaatggacccaactcaaaaaaaaa

SEQ ID NO: 1127 - protein, 185 aa, Homo sapien
MDAAEVEFLAEKELVTIIPNFSLDKIYLIGGDLGPFNPGLPVEVPLWLAINLKQRQKCRLLPPEWMDVEKLEKMRDHERKEETFTPMPSPYYMELTKLLLNHASDNIPKADEIRTLVKDMWDTRIAKLRVSADSFVRQQEAHAKLDNLTLMEINTSGTFLTQALNHMYKLRTNLQPLESTQSQDF

SEQ ID NO: 1128 - DNA, 2509 bp, Homo sapien
ctcgccgagatgacctgggcacctctgcgttgaatcggcaaatactgatcaagccgcatttattctgctctcaggaactctaagtctagcagagaagatgaggcggtagaagttcatcaatggcttggctggaggacaagcaaattgaggacattggcaacggagtgatcaaaatgatagatcatgaggcctaaaatgaataaggaaagaagagaagtggcagaggctgagaacagaaagagagggtggaggggctgtaaatcttgaagattagggtataatatgagtatatgggtaagaattggaagaattgtgtaggaggcagtagtcaaaaagtagaagcagtttggaagagtagttacaaatatcaagagccaggtggctaaaaggtggagctataggtcattgaagctcaagaaactgagtctctagggcattggttaagtcatctgtctagacttcaaagttgtctaggatgataattcagaagactgatctgtgccaaagtcacaggtttttcacgactgaaaacaacatagcaaaataagccaagatgtctgtggatccaatgacctacgaggcccagttctttggcttcacgccacaaacgtgcatgcttcggatctacattgcatttcaagactacctatttgaagtgatgcaggccgttgaacaggttattctgaagaagctggatggcatcccagactgtgacattagcccagtgcagattcgcaaatgcacagagaagtttctttgcttcatgaaaggacattttgataacctttttagcaaaatggagcaactgtttttgcagctgattttacgtattccctcaaacatcttgcttcctgaagataaatgtaaggagacaccttatagtgaggaagattttcagcatctccagaaagaaattgaacagttacaggagaagtacaagactgaattatgtactaagcaggcccttcttgcagaattagaagagcaaaaaattgttcaggccaaactcaaacagacgttgactttctttgatgagcttcataatgttggcagagatcatgggactagtgattttagggagagtttagtatccctggttcagaactccagaaaactacagaacattagagacaatgtggaaaaggaatcgaaacgactgaaaatatcttaattgctcagtagtcaaaaggaggagcctgtcaaaaagtagaatcataaggactgttcaaaccataaggactgttcaaatcataccagtgactgttcaaaccaaccatactttttattagatttgctttgtcaactctttcttgtattctgtgttttcctcttttttggtccactttgctgaggtatgaagtgtactactttgaactaggctgaagcatctgagtcttctaataagtgggaagggatccaacaaagaagccatgaccagttaaagatatttgcagagttacaccttggtcataagtcctttgtgaccttgattattttggcttactctttggatgagaccagacaagaaaaggattaaacgggtggctcctttaatattattattattgtttttgagacaaggtccctttctgtcacccaggttagagtagatttcagtggcacaatcttggctcactgcaacctctgtgtcctgggctcaagtgatcctcctgcctcagcctcccaagtagctaggaccacaggtgcgtgtcaccatgcttggctaatttttttgcagaaacgaggcctcactatattgtccaggctgagtggctcttttattaaccagtcattacactgcggaacagccaacatagagtacttgctctcgtcctgtgaattttctttcatgagggagtcaatatgtagtggaaagaagcatgtagcaaaaaagacaaccttgatctttaataaaaaagaagttggtttatttccaaaataaatcccctgacaaaaaacctggtgatgttaagcaattgactgtcttagagtccagcagaagaccttagacaaaaaaagcagaacccactggagtagaaaaggaagcatgtagcatatactcagtagtgaaatttaattttactgactgttaggtatctatgccaatttgttttcatacttcagttggttttggaatctgccttatacctaatatttatttattcacactcataagcatcaaatatttaatgccctcagtgggaaatttgtgtttaaactcaatggaatctaatatttctttatgtcgttagtccctgtaaaatgttaggtcacccaaggaaaggggagaaatagcaatggttgttcctaaggtattgcttgccctccatgtcttcctaaagagcagaacttggagtttctcctttatgtagagaagaagtaacttagggtgtatttgcaatgaaatattcatagatattgaaagcttgtgtttacatgaaatatgtttattatcaagaagtcctttttccaattctgtacattaaatatatgtgttttaaaaaaaaaa

SEQ ID NO: 1129 - protein, 205 aa, Homo sapien
MSVDPMTYEAQFFGFTPQTCMLRIYIAFQDYLFEVMQAVEQVILKKLDGIPDCDISPVQIRKCTEKFLCFMKGHFDNLFSKMEQLFLQLILRIPSNILLPEDKCKETPYSEEDFQHLQKEIEQLQEKYKTELCTKQALLAELEEQKIVQAKLKQTLTFFDELHNVGRDHGTSDFRESLVSLVQNSRKLQNIRDNVEKESKRLKIS

SEQ ID NO: 1130 - DNA, 1637 bp, Homo sapien
gtgggactgggatcatcagtctcttctgtgcacactatgcgcggcctagagcggtgtacgcggtggaggccagtgagatggcacagcacacggggcagctggtcctgcagaacggctttgctgacatcatcaccgtgtaccagcagaaggtggaggatgtggtgctgcccgagaaggtggacgtgctggtgtctgagtggatggggacctgcctgctgtttgagttcatgatcgagtccatcctgtatgcccgggatgcctggctgaaggaggacggggtcatttggcccaccatggctgcgttgcaccttgtgccctgcagtgctgataaggattatcgtagcaaggtgctcttctgggacaacgcgtacgagttcaacctcagcgctctgaagtaagtgtccacagctgggactggcaccgtcttgtggggcctcctggtccacagtctgcaggtgggccaaggccctgggagatcccatacgacggttggataaatgagggtacctgtgcacccagataggacaatctgttgtagcattggagtaattaaagcagtatggtgctataacaagacagatgggcagagcagggtagaatgcaaggaacaaaaattttcgtatgtgaaaaaggtggcattacgattaggagggagtgagggccaagtcagcaaattattctggagcagttgattagcccttgttctctcacgccatacgtgaaaacttaattctgcatggaatcagcgtcagcgacagacatccatgggggcctgtgtgcaccatcttaggtggagaaatgagcagcaacaatggatggaatggaccctgggctagatagaatctggcagtctatgtggcagaaatcagcaaaaacacgattgtaaaagcaaacaagtaattagagaaatcacgtgctgtcaggtcttggaatcaattagaaagagatgactagccagatggaattgcagcccaatcatgtgaacaggcaaaccgcaaaaaataaataaaattaccaataaatacatgaaaaattataatgttgttagtagttaaaatgcgaattaaaatacatgctgttttccctaccagacaagcaaagagtaaattaaaatagtagcccaggcttgcctggcagtggcagggaggtgtggctgccagggccttagaggttggcatcaggctgcccaccccagtcactgccagagcctcccacctgagtgttcctcccggcactggaagccagtggccgtccagaggaacgtgattgaattgctgtatatccatctggtggagcactgctgtgtgtctgttaaaaaagaaaccataggtttttagggatatgtaatgatatttagaaagggtttaagagacagtaaagcttggcagaataaaccgtgtatacagaatggatgtttgcttgcataaataaatttatataaatatgtctgggggataaaaataagtatatcacaatgctaagacaggcatatggggaatttaagcttttctttatacttgtccatagtttccaatttttaaatttgtaattttttatcagaaaaataaatgtgtaaatatagtggaatctttattaaaacattcacttttatttgctaaaaaaaaaaaaaaaaaaaa

SEQ ID NO: 1131 - DNA, 1977 bp, Homo sapien
ggcacgaggatttcctcatcgtcaagctttgttcctcgtgggggctagaaatctctttccagttccagattgtgaagggttcctgagtaagcagcgtgtctccatccccctctctaggggctcttggatggaccttgcactctagaagggacaatggacttctggctttggccactttacttcctgccagtatcgggggccctgaggatcctcccagaagtaaaggtagagggggagctgggcggatcagttaccatcaagtgcccacttcctgaaatgcatgtgaggatatatctgtgccgggagatggctggatctggaacatgtggtaccgtggtatccaccaccaacttcatcaaggcagaatacaagggccgagttactctgaagcaatacccacgcaagaatctgttcctagtggaggtaacacagctgacagaaagtgacagcggagtctatgcctgcggagcgggcatgaacacagaccggggaaagacccagaaagtcaccctgaatgtccacagtgaatacgagccatcatgggaagagcagccaatgcctgagactccaaaatggtttcatctgccctatttgttccagatgcctgcatatgccagttcttccaaattcgtaaccagagttaccacaccagctcaaaggggcaaggtccctccagttcaccactcctcccccaccacccaaatcacccaccgccctcgagtgtccagagcatcttcagtagcaggtgacaagccccgaaccttcctgccatccactacagcctcaaaaatctcagctctggaggggctgctcaagccccagacgcccagctacaaccaccacaccaggctgcacaggcagagagcactggactatggctcacagtctgggagggaaggccaaggatttcacatcctgatcccgaccatcctgggccttttcctgctggcacttctggggctggtggtgaaaagggccgttgaaaggaggaaagccctctccaggcgggcccgccgactggccgtgaggatgcgcgccctggagagctcccagaggccccgcgggtcgccgcgaccgcgctcccaaaacaacatctacagcgcctgcccgcggcgcgctcgtggagcggacgctgcaggcacaggggaggcccccgttcccggccccggagcgccgttgccccccgccccgctgcaggtgtctgaatctccctggctccatgccccatctctgaagaccagctgtgaatacgtgagcctctaccaccagcctgccgccatgatggaggacagtgattcagatgactacatcaatgttcctgcctgacaactccccagctatcccccaaccccaggctcggactgtggtgccaaggagtctcatctatctgctgatgtccaatacctgcttcatgtgttctcagagccctcatcacttcccatgccccatctcgactcccatccccatctatctgtgccctgagcatggctctgcccccaggtcgtcttgcacaccttggcagccccctgtagttgacaggtaagctgtaggcatgtagagcaattgtcccaatgccacttgcttcctttccaagccgtcgaacagactgtgggatttgcagagtgtttcttccatgtctttgaccacagggttgttgctgcccaggctctagatcacatggcatcaggctggggcagaggcatagctattgtctcgggcatccttcccagggttgggtcttacacaaatagaaggctcttgctctgagttatgtgacatgcctcagccccatggactaagcaggggtctggtataaaaacactcctggaaacgcctttgccctgatccaaatgttagcacttgctagtgaacgtctacttatctcaagttctatgctaaaggcaatttatcttgatgtgatgataaaccaaacttattagcaagatatgcatatatatcaaaaaaaaaaaaaaaaaa

SEQ ID NO: 1132 - protein, 390 aa, Homo sapien
MDFWLWPLYFLPVSGALRILPEVKVEGELGGSVTIKCPLPEMHVRIYLCREMAGSGTCGTVVSTTNFIKAEYKGRVTLKQYPRKNLFLVEVTQLTESDSGVYACGAGMNTDRGKTQKVTLNVHSEYEPSWEEQPMPETPKWFHLPYLFQMPAYASSSKFVTRVTTPAQRGKVPPVHHSSPTTQITHRPRVSRASSVAGDKPRTFLPSTTASKISALEGLLKPQTPSYNHHTRLHRQRALDYGSQSGREGQGFHILIPTILGLFLLALLGLVVKRAVERRKALSRRARRLAVRMRALESSQRPRGSPRPRSQNNIYSACPRRARGADAAGTGEAPVPGPGAPLPPAPLQVSESPWLHAPSLKTSCEYVSLYHQPAAMMEDSDSDDYINVPA

SEQ ID NO: 1133 - DNA, 1977 bp, Homo sapien; identical to SEQ ID NO: 1131

SEQ ID NO: 1134 - protein, 390 aa, Homo sapien; identical to SEQ ID NO: 1132

SEQ ID NO: 1135 - DNA, 2189 bp, Homo sapien
aggggcgggcccggcgcgcgcgggaagtctctgtagggcggccggctaccctcagccgccgcgcgtcatggccctttcggtgcccggctactcaccgggcttccgaaagccgcccgaggtagtgcggctccgacggaaaagggcccggagccgtggagctgccgcctccccgccccgtgagctgacggagccggcggcccgccgagccgccctggtggcggggctgcctcttcgccctttccctgctgcggggggcagaggcggtggcagcggcggcggcccggccgctgctcggaggaaccccttcgcccgcctggacaaccgaccgcgggtcgccgcggagccccccgacgggccggcccgcgagcagccggaggccccggtcccgtttttagattctaatcaagaaaatgatttgctatgggaagagaagtttcctgaaagaacaactgttactgaattacctcagacttcacatgtatcattctccgagcctgatattccgtcctcaaaaagtactgagttacctgtggactggagtattaaaacgcgactccttttcacctcttctcaaccctttacctgggcagatcatttgaaagcacaggaagaagctcaaggtcttgtccagcattgtagggcaacagaagttactttgcctaaaagtatacaggatcccaaactctcctctgagctccgttgtaccttccagcagagccttatctattggctccaccctgctttgtcttggctaccactgttccctcgtattggagctgatagaaaaatggctggaaagacaagtccttggtcaaatgatgcaaccctgcagcatgttttaatgagtgactggtctgtgagctttacttctctatataatttgctgaagacaaaactttgcccctatttctacgtttgtacctatcagtttactgtcctgttccgagcagcaggattagctggaagtgacttaatcacagctctcatatctccaacaactcgaggtttaagagaagctatgagaaatgaaggtattgaattttctctgcctttaataaaagaaagtggccataagaaggagacagcatctggaacaagcttgggatatggggaggagcaagccatcagtgatgaggatgaagaggaaagtttttcctggctggaagagatgggtgtgcaagataaaattaaaaagccagacatactttctatcaagctgcgtaaagagaaacatgaagtacaaatggatcacagacctgaatctgttgtgttggtaaaaggaatcaacacctttacattgctcaattttttgattaactctaagagtttagttgctacctcaggtccacaggcaggacttcctccaaccctcttgtcccctgttgctttccgaggtgccacaatgcaaatgcttaaggcacggagtgtgaatgtgaagacacaagctctttctggatacagagaccaatttagtttggagattacaggtcctatcatgcctcattctctgcattcactgaccatgctgctcaaatcttcacagagtggatctttctctgcagtactgtatccacacgagccaactgctgtatttaacatctgcctgcaaatggacaaagtacttgatatggaggttgttcataaggagcttactaactgtggtttgcaccctaacactctggagcaacttagtcaaataccgttacttgggaaatcatctttacggaatgtggtgctgagagactacatttataattggagatcctgaacaccaaagtaagcctaaaaggaatctttgaggaaaaaagccttctagcaaggaaattcaagattcttgaagttgaaggaatatactgaaatgtttataaacataacttttactacagtagcatctaaggttttaaatgtgttttactattttcagattagatttttagatataaagatgaaaaactcagataactcaaatgagatatctatatccctacaacctaattgtatattgagcagaaactgaattaatatgcttccttgcaaatgggaaatcacatagcagttaccccatggcattgtgactaatggcatcagggcaaaaatatgttactttacgatttacctgttagcaggttcttgtttcataaaggtagaaaataaatacagacaacatctaaaaaaaaaaaaaaaaaaaa

SEQ ID NO: 1136 - protein, 566 aa, Homo sapien
MALSVPGYSPGFRKPPEVVRLRRKRARSRGAAASPPRELTEPAARRAALVAGLPLRPFPAAGGRGGGSGGGPAAARRNPFARLDNRPRVAAEPPDGPAREQPEAPVPFLDSNQENDLLWEEKFPERTTVTELPQTSHVSFSEPDIPSSKSTELPVDWSIKTRLLFTSSQPFTWADHLKAQEEAQGLVQHCRATEVTLPKSIQDPKLSSELRCTFQQSLIYWLHPALSWLPLFPRIGADRKMAGKTSPWSNDATLQHVLMSDWSVSFTSLYNLLKTKLCPYFYVCTYQFTVLFRAAGLAGSDLITALISPTTRGLREAMRNEGIEFSLPLIKESGHKKETASGTSLGYGEEQAISDEDEEESFSWLEEMGVQDKIKKPDILSIKLRKEKHEVQMDHRPESVVLVKGINTFTLLNFLINSKSLVATSGPQAGLPPTLLSPVAFRGATMQMLKARSVNVKTQALSGYRDQFSLEITGPIMPHSLHSLTMLLKSSQSGSFSAVLYPHEPTAVFNICLQMDKVLDMEVVHKELTNCGLHPNTLEQLSQIPLLGKSSLRNVVLRDYIYNWRS

SEQ ID NO: 1137 - DNA, 2427 bp, Homo sapien
cggacgcgtggggagaggctgtttaccagaacagcataacaagggcaggtctgactgcaaggctgggactgggaggcagagccgccgccaagggggcctcggttaaacactggtcgttcaatcacctgcaagacgaaggaggcaaggatgctgttggcctgggtacaagcattcctcgtcagcaacatgctcctagcagaagcctatggatctggaggctgtttctgggacaacggccacctgtaccgggaggaccagacctcccccgcgccgggcctccgctgcctcaactggctggacgcgcagagcgggctggcctcggcccccgtgtcgggggccggcaatcacagttactgccgaaacccggacgaggacccgcgcgggccctggtgctacgtcagtggcgaggccggcgtccctgagaaacggccttgcgaggacctgcgctgtccagagaccacctcccaggccctgccagccttcacgacagaaatccaggaagcgtctgaagggccaggtgcagatgaggtgcaggtgttcgctcctgccaacgccctgcccgctcggagtgaggcggcagctgtgcagccagtgattgggatcagccagcgggtgcggatgaactccaaggagaaaaaggacctgggaactctgggctacgtgctgggcattaccatgatggtgatcatcattgccatcggagctggcatcatcttgggctactcctacaagagggggaaggatttgaaagaacagcatgatcagaaagtatgtgagagggagatgcagcgaatcactctgcccttgtctgccttcaccaaccccacctgtgagattgtggatgagaagactgtcgtggtccacaccagccagactccagttgaccctcaggagggcagcaccccccttatgggccaggccgggactcctggggcctgagcccccccagtgggcaggagcccatgcagacactggtgcaggacagcccaccctcctacagctaggaggaactaccactttgtgttctggttaaaaccctaccactcccccgcttttttggcgaatcctagtaagagtgacagaagcaggtggccctgtgggctgagggtaaggctgggtagggtcctaacagtgctccttgtccatcccttggagcagattttgtctgtggatggagacagtggcagctcccacagtgatgctgctgctaagggcttccaaacattgcctgcacccctggaactgaaccagggatagacggggagctcccccaggctcctctgtgctttactaagatggcctcagtctccactgtgggcttgagtggcatacactgttattcatggttaaggtaaagcaggtcaagggatggcattgaaaaaatatatttagtttttaaaatatttgggatggaactccctactgacctctgagaactggaaacgagtttgtacagaagtcagaactttgggttgggaatgagatctaggttgtggctgctggtatgcttcagcttgctggcaatgatgtgccttgacaaccgtgggccaggcctgggcccagggactcttcctgtttcataaggaaaggaagaattgcactgagcattccacttaggaagaggatagagaaggatctgctccgcctttggccacaggagcagaggcagacctgggatgccccagtttctcttcagggatggatagtgacctgtcttcattttgcacaggtaagagagtagttagctaacctatgggaattatactgtggggccttgtgagctgcttctaagaggctaacctggaaactaagctcagaggcaaggtaataaagcacttcagggcttgctccccaagtgggcctgatttagcaggtggtcctgcgggcgtccaggtcagcaccttcctgtagggcactggggctagggtcacagcccctaactcataaagcaatcaaagaaccattagaaagggctcattaagccttttggacacaggaccccagagaggaaaaagtgacttgcccaaggtcgtaagcaagctactggcatggcaagagcccagcttcctgacggagcgcaacatttctccactgcactgtgctagcagctcagcagggcctctaacctgtgatgtcacactcaagaggccttggcagctcctagccatagagcttcctttccagaacccttccactgcccaatgtggagacaggggttagtggggctttctatggagccatctgctttggggacctagacctcaggtggtctcttggtgttagtgatgctggagaagagaatattactggtttctacttttctataaaggcatttctctatatacatgttttatatacctcattctgacacctgcatatagtgtgggaaattgctctgcatttgacttaattaaaaaaaaaaaaaaa

SEQ ID NO: 1138 - protein, 263 aa, Homo sapien
MLLAWVQAFLVSNMLLAEAYGSGGCFWDNGHLYREDQTSPAPGLRCLNWLDAQSGLASAPVSGAGNHSYCRNPDEDPRGPWCYVSGEAGVPEKRPCEDLRCPETTSQALPAFTTEIQEASEGPGADEVQVFAPANALPARSEAAAVQPVIGISQRVRMNSKEKKDLGTLGYVLGITMMVIIIAIGAGIILGYSYKRGKDLKEQHDQKVCEREMQRITLPLSAFTNPTCEIVDEKTVVVHTSQTPVDPQEGSTPLMGQAGTPGA

SEQ ID NO: 1139 - DNA, 2427 bp, Homo sapien; identical to SEQ ID NO: 1137

SEQ ID NO: 1140 - protein, 263 aa, Homo sapien; identical to SEQ ID NO: 1138

SEQ ID NO: 1141 - DNA, 1512 bp, Homo sapien
gcggagcgcgcagcgggggctgcagattctttccaccatggccagacgcccccggaacagcagggcctggcacttcgtcctgagtgcagcccgccgagacgcagatgcccgggccgtggctctagcaggctccactaactggggctacgactctgatgggcagcacagcgactcggactccgaccccgagtactccacgctgccgccatccatccccagtgcggtgcccgtgaccggcgagtccttctgtgactgtgctgggcagagcgaggcctccttctgtagcagcctgcactcggcccaccggggcagggactgccgctgcggagaggaagacgagtatttcgactgggtctgggatgacttaaataagtcatcagccaccctgctgagctgtgacaaccgtaaggtcagcttccacatggagtacagctgcggcacagcggccatccggggcaccaaggagctgggggagggccagcacttctgggagatcaagatgacctctcccgtctacggcaccgacatgatggtgggcatcgggacgtcggatgtggacctggacaaataccgccacacgttctgcagcctgctgggcagggatgaggacagctggggcctctcctacacgggcctcctccaccacaagggcgacaagaccagcttctcgtcgcggttcggccagggctccatcattggcgtgcacctggacacctggcacggcacactcacctttttcaagaacaggaagtgtataggtgtggcagccaccaagctgcagaacaagagattctacccgatggtgtgctccacggcggcccggagcagcatgaaggtcacccgctcctgtgccagcgccacttccctccagtacctgtgctgccaccgcctgcgccagctgcggccagactcgggagacacgctggagggtctgccgctgccgccgggcctcaagcaggtgctacacaacaagctgggctgggtcctgagcatgagttgcagccgccgcaaggctccagtgtccgatccccaggcagcgacctccgcccaccccagcagtcgcgagcctcggccctgccagaggaagcgctgccgccggacctgactgacttcccagtggaactgccttcttgggctgggacagcccctttcctctgtcccttctttctctgtcccttccttccagccacactccagggcggagttggatgaggcccgtccggagggagccatctcttgctcccgaggctgggacagtcctttctgtgggggctctagggcccctctgctgctgtgctgggtggggaagcggctgccctgagccccaggtcttgtgggaggctgcgaggacgagagcctggctggagcccgcgttgctgttcccacagggcctcggtttttcctaacttgctctgcatgctgtcagcggctgccccgccgtcatagacttaaaggactgcaataaatgtagagttgatgtctaaaaaaaaaaaaaaaaaaaaaaaaaaaaaa

SEQ ID NO: 1142 - DNA, 1706 bp, Homo sapien
gttgtgagctgcggcagagactggtggctggaggagacgccggcgctggagagtgcgctgcgccgcccgccgctgagggaccgcggggttagccactgctggctgcttccagtgttcgccgagaggtaccgggggtgacagctccgggaccggccgaaaggcgaggaaccggtgtggaaattaaaagaacacacatattttgactggggctttgatcaaccaaatgctaaaaagccacacaaagaagatccctaatagtcatttctcaacaattatatagtcaactgatgtaacaatggtactaatattgggacgcagactaaacagagaggatcttggggtgcgtgattccccagcaactaagcgaaaagtttttgaaatggaccccaaatctctgacaggtcatgagttttttgacttctcttcaggatcatcccatgccgaaaacatactccagatatttaatgaatttcgtgatagccgcttattcacagatgttatcatttgtgtggaaggaaaagaatttccttgccatagagctgtgctctcagcctgtagcagctacttcagagctatgttttgtaatgaccacagggaaagccgagaaatgttggttgagatcaatggtattttagctgaagctatggaatgttttttgcagtatgtttatactggaaaggtgaagatcactacagagaatgtacagtatctctttgagacatcaagcctctttcagattagtgttctccgtgatgcatgtgccaagttcttggaggagcaacttgatccttgtaattgcttaggaatccagcgctttgctgatacccattcactcaaaacactcttcacaaaatgcaaaaattttgcgttacagacttttgaggatgtatcccagcacgaagaatttcttgagcttgacaaagatgaactttatgttgtcggtggctatgatgggcaaaacagacttagcagcgtagaatgttatgattccttttcaaatcgatggactgaagttgctccccttaaggaagccgtgagttctcctgcagtgactagctgtgtaggcaaactgtttgtgattggtggaggacctgatgataatacttgttctgataaggttcaatcttatgatccagaaaccaattcttggctacttcgtgcagctatcccaattgccaaaaggtgtataacagctgtatccctaaacaacctgatctatgttgccggtggactgaccaaggcaatatgctgttacgatccagttgaagattactggatgcacgtacagaatacattcagccgtcaggaaaactgtggtatgtctgtgtgtaatggtaaaatatatatcctgggcggaagacgggaaaatggagaagccacagacactattctctgttatgatcctgcaacaagtatcatcacaggggtagctgcaatgcccaggccagtgtcctatcatggctgtgtgactattcatagatacaatgagaaatgctttaaactctgaagacaggatacctcaccgaagaagccacactgatccaagatgggaggttttaaaaactctacagtgggaacttcacatatctcctttgtgccatatgcaaaaaatagtaaaaataataatttggtgcctttctcctcaaaatatcaatctttcaaactataataaagcctttcctataattgaaaaaaaaaaaaaaaaa

SEQ ID NO: 1143 - protein, 403 aa, Homo sapien [sequence omitted]

SEQ ID NO: 1144 - DNA, 1817 bp, Homo sapien
gatcaatggtattttagctgaagctatggaatgttttttgcagtatgtttatactggaaaggtgaagatcactacagagaatgtacagtatctctttgagacatcaagcctctttcagattagtgttctccgtgatgcatgtgccaagttcttggaggagcaacttgatccttgtaattgcttaggaatccagcgctttgctgatacccattcactcaaaacactcttcacaaaatgcaaaaattttgcgttacagacttttgaggatgtatcccagcacgaagaatttcttgagcttgacaaagatgaacttattgattatatttgtagtgatgaacttgttattggtaaagaggagatggtttttgaagccgtcatgcgttgggtctatcgtgccgttgatctgagaagaccactgttacacgagctcctgacacatgtgagactccctctgttgcatcccaactactttgttcaaacagttgaagtggaccaattgatccagaattctcctgagtgttatcagttgttgcatgaagcaagacggtaccacatacttgggaatgaaatgatgtccccaaggactaggccacgcaggtccactggctattctgaggtgatagttgtcgttggaggatgtgagcgagttggaggatttaatcttccatacactgagtgctacgatcctgtaacaggagaatggaagtctttggctaagcttccagaatttaccaaatcagagtatgcagtctgtgctctaaggaatgacattcttgtttcaggtggaagaatcaacagccgtgatgtctggatttataactcacagttaaatatttggatcagagttgcctctctcaataaaggcagatggcgtcacaaaatggctgtcctccttggtaaagtatatgttgtcggtggctatgatgggcaaaacagacttagcagcgtagaatgttatgattccttttcaaatcgatggactgaagttgctccccttaaggaagccgtgagttctcctgcagtgactagctgtgtaggcaaactgtttgtgattggtggaggacctgatgataatacttgttctgataaggttcaatcttatgatccagaaaccaattcttggctacttcgtgcagctatccgaattgccaaaaggtgtataacagctgtatccctaaacaacctgatctatgttgccggtggactgaccaaggcaatatactgttacgatccagttgaagattactggatgcacgtacagaatacattcagccgtcaggtaataacatgaagcagtacaaaagaaaaataaatctaagagggaccaagtacataatcattattaatacactggaatttcaattttaaaatatttcaggctgggcgtggtggctcacgcctgtggtcccagcactttgggaggccgaggtggatagatcacttgaggtcaggagttcaagaccagcctggctaatatggtgaaaccccgtctctactaaaaaattatggccaggcgtggtggttcatgcctgtaatcccagcactttgggaggctgaggcaggccaatcacctgaggtcgggagttcgagaccagcctgaccaacatggagaaaccccgtctctgctaaaaatacaaaattagctgggcgtggtggcgcattgcctgtaatcccagctactagggaggctgcggcaggagaattgcttgaacccgggaggtggaggtcgcggtgagccgagatcgagccattgcactccagcctggacagcaggagcgaaactccgtctcaaaaataaataaaaaaaaaaaaaaaaa

SEQ ID NO: 1145 - protein, 421 aa, Homo sapien
MECFLQYVYTGKVKITTENVQYLFETSSLFQISVLRDACAKFLEEQLDPCNCLGIQRFADTHSLKTLFTKCKNFALQTFEDVSQHEEFLELDKDELIDYICSDELVIGKEEMVFEAVMRWVYRAVDLRRPLLHELLTHVRLPLLHPNYFVQTVEVDQLIQNSPECYQLLHEARRYHILGNEMMSPRTRPRRSTGYSEVIVVVGGCERVGGFNLPYTECYDPVTGEWKSLAKLPEFTKSEYAVCALRNDILVSGGRINSRDVWIYNSQLNIWIRVASLNKGRWRHKMAVLLGKVYVVGGYDGQNRLSSVECYDSFSNRWTEVAPLKEAVSSPAVTSCVGKLFVIGGGPDDNTCSDKVQSYDPETNSWLLRAAIRIAKRCITAVSLNNLIYVAGGLTKAIYCYDPVEDYWMHVQNTFSRQVIT

SEQ ID NO: 1146 - DNA, 2477 bp, Homo sapien
gcagaggtgcggccggggaggcgcgcggaggctggagctggaggcgcggcgccggtgagctgagaaccatgtgtgctcagtattgcatctcctttgctgatgttgaaaaagctcatatcaacattcgagattctatccacctcacaccagtgctaacaagctccattttgaatcaactaacagggcgcaatcttttcttcaaatgtgaactcttccagaaaacaggatcttttaagattcgtggtgctctcaatgccgtcagaagcttggttcctgatgctttagaaaggaagccgaaagctgttgttactcacagcagtggaaaccatggccaggctctcacctatgctgccaaattggaaggaattcctgcttatattgtggtgccccagacagctccagactgtaaaaaacttgcaatacaagcctacggagcgtcaattgtatactgtgaacctagtgatgagtccagagaaaatgttgcaaaaagagttacagaagaaacagaaggcatcatggtacatcccaaccaggagcctgcagtgatagctggacaagggacaattgccctggaagtgctgaaccaggttcctttggtggatgcactggtggtacctgtaggtggaggaggaatgcttgctggaatagcaattacagttaaggctctgaaacctagtgtgaaggtatatgctgctgaaccctcaaatgcagatgactgctaccagtccaagctgaaggggaaactgatgcccaatctttatcctccagaaaccatagcagatggtgtcaaatccagcattggcttgaacacctggcctattatcagggaccttgtggatgatatcttcactgtcacagaggatgaaattaagtgtgcaacccagctggtgtgggagaggatgaaactactcattgaacctacagctggtgttggagtggctgctgtgctgtctcaacattttcaaactgtttccccagaagtaaagaacatttgtattgtgctcagtggtggaaatgtagacttaacctcctccataacttgggtgaagcaggctgaaaggccagcttcttatcagtctgtttctgtttaatttacagaaaaggaaatggtgggaattcagtgtctttagatactgaagacattttgtttcctagtattgtcaactcttagttatcagattcttaatggagagtggctatttcattaagatttaatagttttttttggactaagtagtggaaaaacttttatacttaactgagacattttgtcaaggctaaaaaaaagtcttgcaaaatggggcagtggactgacaggctgacatagaaaataaactttgcccaatcacaacttgtgcctcccatccctggagtactgactggcaccggtaagacagaatctctctgaatccattactccatgcccccttgaggcactgttgaagaaatctcacttttcagccagggtactggttctggtacatatggatcataagtccatttggggaagactcgtttatacaggttcatcagtactgtgtcttgagattttagcttcccatcaaagctgcatttcatgtggccatgggtacctagaaagacatcagaacaagtcggtcaaattaaaagtagaaaattttaaagcaatgacttccaacccaacagtcatttagcaacactgcagaaatgcagacatggtctcaaatcccgtgtttccttacctaaaggttccttgatatgtcctctccggccccacttcgttctcagttccactggtttaaaccacagcacatcctcttagaatcaaacacattaaagaccaagatgaaacatttacccacaaaatgtaaacccaacctttataccacaaaggcaatcagatcccatcctcctccttcatacccacctctgttgaagaacatgtaacgtactactgccatcttagtaaaaattttgaaaggatgaccactcagaacaactctcttgatgaccattctgtctggatctactgacataagatggcctgtagcaatgaggctgtgcattcctaaaggacaaaagcaaagaagctatttaggaatttacaggccaaagtcttcatttattgcccagtccatttaaagacccatgcaagagcctggtttgtcatccctgccctagcccaatctgaggctaagattggtaaactgtaagcccacacttaaccttgtcaataggttcttgaaaacttgtacttcaagagaaatgatgtataacaaaaccatactttttctcatcagttgttacaaggaaaggatgttgaacaaaaggcagttatttgaggactggctatacactgtttcacgtaaaagttggagttttcattgttctattaacaatgttaaatgaagacttactgtattttgaaaaccatcattaccttctccataccatttggctcccaaatttaaataaacaagagaaaacggtgttcatct

SEQ ID NO: 1147 - protein, 340 aa, Homo sapien
MCAQYCISFADVEKAHINIRDSIHLTPVLTSSILNQLTGRNLFFKCELFQKTGSFKIRGALNAVRSLVPDALERKPKAVVTHSSGNHGQALTYAAKLEGIPAYIVVPQTAPDCKKLAIQAYGASIVYCEPSDESRENVAKRVTEETEGIMVHPNQEPAVIAGQGTIALEVLNQVPLVDALVVPVGGGGMLAGIAITVKALKPSVKVYAAEPSNADDCYQSKLKGKLMPNLYPPETIADGVKSSIGLNTWPIIRDLVDDIFTVTEDEIKCATQLVWERMKLLIEPTAGVGVAAVLSQHFQTVSPEVKNICIVLSGGNVDLTSSITWVKQAERPASYQSVSV

SEQ ID NO: 1148 - DNA, 775 bp, Homo sapien
  Unsure 7: Unknown base
  Unsure 11-12: Unknown base
  Unsure 26: Unknown base
  Unsure 28: Unknown base
  Unsure 567: Unknown base
  Unsure 583: Unknown base
  Unsure 586-589: Unknown base
  Unsure 591: Unknown base
  Unsure 593-594: Unknown base
  Unsure 597: Unknown base
  Unsure 599: Unknown base
  Unsure 601-602: Unknown base
  Unsure 605: Unknown base
  Unsure 609: Unknown base
  Unsure 617: Unknown base
  Unsure 619: Unknown base
  Unsure 630: Unknown base
  Unsure 634: Unknown base
  Unsure 638: Unknown base
  Unsure 640-641: Unknown base
  Unsure 646-648: Unknown base
  Unsure 651-652: Unknown base
  Unsure 656-658: Unknown base
  Unsure 660: Unknown base
  Unsure 665: Unknown base
  Unsure 667-668: Unknown base
  Unsure 671-673: Unknown base
  Unsure 678-679: Unknown base
  Unsure 683-684: Unknown base
  Unsure 687: Unknown base
  Unsure 689: Unknown base
  Unsure 692-694: Unknown base
  Unsure 697-698: Unknown base
  Unsure 702: Unknown base
  Unsure 704: Unknown base
  Unsure 711: Unknown base
  Unsure 713: Unknown base
  Unsure 716: Unknown base
  Unsure 718-719: Unknown base
  Unsure 721: Unknown base
  Unsure 723-725: Unknown base
  Unsure 728: Unknown base
  Unsure 730-731: Unknown base
  Unsure 736: Unknown base
  Unsure 740: Unknown base
  Unsure 742: Unknown base
  Unsure 744: Unknown base
  Unsure 746: Unknown base
  Unsure 748-749: Unknown base
  Unsure 757-760: Unknown base
  Unsure 763-764: Unknown base
  Unsure 767-770: Unknown base
  Unsure 774-775: Unknown base
ggttttntggnngggggttttcaacncnggctcttgttctttttgcaggacccatcgattcgaattcggcacgagcatcagtatgcttatggatttgatgacaggcatagcctgggcatatcacctcattggtaaagggctagagcctttcttttttatggcacttctttttttgagatagggtcttactctgtcaccctggctagagtacactggtacaatcacggctcaatgtaggcttaacctcctgggctcaggtgtatgtcactatgcccggctactttttgtattttttggtagagacggcttcgccacgttgcccaggctgcaagcgatatgcctaggctcaagcgatctgcccacctcaacttccggaagtgctgagattacaggtgtgagccactgcacccagcctttgctttattttttattttttgagaggtatgattctttctagagattttttctcatggctactattagatcaggaatgggtgattggagattattagattctaggttaacttctaccactttaccctaatacataaaactttttcctaaatnaatgatggaaggaatnaannnnancnnccncntnnccnctantacaaaancnctagcccttanaacntttngnnagctnnnttnncctnnntntcccntnntcnnnccccnncctnnttntnccnnnctnnctcnanccccacnanttncnntntnnnctncnnaatanattncncncntnnctcctcannnnctnntcnnnnctcnn

SEQ ID NO: 1149 - DNA, 506 bp, Homo sapien
attccttccatcatttatttaggaaaaagttttatgtattagggtaaagtggtagaagttaacctagaatctaataatctccaatcacccattcctgatctaatagtagccatgagaaaaaatctctagaaagaatcatacctctcaaaaaataaaaaataaaacaaaggctgggtgcagtggctcacacctgagcccaggaggttaagcctacattgagccgtgattgtaccagtgtactctagccagggtgacagagtaagaccctatctcaaaaaaagaagtgccataaaaaagaaaggctctagccctttaccaatgaggtgatatgcccaggctatgcctgtcatcaaatccattaaccttcctggtgatggccatgagaaagtccagcacacaaaccatgccccagactgcatctgtgcatacacagagtaaaagccctgctgctatactataaaatggcacctgaaaataatctctacggtatgtttgaaaattggcag

SEQ ID NO: 1150 - DNA, 3237 bp, Homo sapien
gcgaagtgaagggtggcccaggtggggccaggctgactgaatgtatctcctagctatggactaaataatacatggggggaaataaacaagtattcatgagggtgaaaatgtgacccagcaggaaaattacaactattttcaattgacgttgaataggatgagtcatggaatttaagtgatttactgaagattatactactggtagatagaagagctaaagaaagatggatactatgatgctgaatgtgcggaatctgtttgagcagcttgtgcgccgggtggagattctcagtgaaggaaatgaagtccaatttatccagttggcgaaggactttgaggatttccgtaaaaagtggcagaggactgaccatgagctggggaaatacaaggatcttttgatgaaagcagagactgagcgaagtgctctggatgttaagctgaagcatgcacgtaatcaggtggatgtagagatcaaacggagacagagagctgaggctgactgcgaaaagctggaacgacagattcagctgattcgagagatgctcatgtgtgacacatctggcagcattcaactaagcgaggagcaaaaatcagctctggcttttctcaacagaggccaaccatccagcagcaatgctgggaacaaaagactatcaaccattgatgaatctggttccattttatcagatatcagctttgacaagactgatgaatcactggattgggactcttctttggtgaagactttcaaactgaagaagagagaaaagaggcgctctactagccgacagtttgttgatggtccccctggacctgtaaagaaaactcgttccattggctctgcagtagaccaggggaatgaatccatagttgcaaaaactacagtgactgttcccaatgatggcgggcccatcgaagctgtgtccactattgagactgtgccatattggaccaggagccgaaggaaaacaggtactttacaaccttggaacagtgactccaccctgaacagcaggcagctggagccaagaactgagacagacagtgtgggcacgccacagagtaatggagggatgcgcctgcatgactttgtttctaagacggttattaaacctgaatcctgtgttccatgtggaaagcggataaaatttggcaaattatctctgaagtgtcgagactgtcgtgtggtctctcatccagaatgtcgggaccgctgtccccttccctgcattcctaccctgataggaacacctgtcaagattggagagggaatgctggcagactttgtgtcccagacttctccaatgatcccctccattgttgtgcattgtgtaaatgagattgagcaaagaggtctgactgagacaggcctgtataggatctctggctgtgaccgcacagtaaaagagctgaaagagaaattcctcagagtgaaaactgtacccctcctcagcaaagtggatgatatccatgctatctgtagccttctaaaagactttcttcgaaacctcaaagaacctcttctgacctttcgccttaacagagcctttatggaagcagcagaaatcacagatgaagacaacagcatagctgccatgtaccaagctgttggtgaactgccccaggccaacagggacacattagctttcctcatgattcacttgcagagagtggctcagagtccacatactaaaatggatgttgccaatctggctaaagtctttggccctacaatagtggcccatgctgtgcccaatccagacccagtgacaatgttacaggacatcaagcgtcaacccaaggtggttgagcgcctgctttccttgcctctggagtattggagtcagttcatgatggtggagcaagagaacattgaccccctacatgtcattgaaaactcaaatgccttttcaacaccacagacaccagatattaaagtgagtttactgggacctgtgaccactcctgaacatcagcttctcaagactccttcatctagttccctgtcacagagagtccgttccaccctcaccaagaacactcctagatttgggagcaaaagcaagtctgccactaacctaggacgacaaggcaacttttttgcttctccaatgctcaagtgaagtcacatctgcctgttacttcccagcattgactgactataagaaaggacacatctgtactctgctctgcagcctcctgtactcattactacttttagcattctccaggcttttactcaagtttaattgtgcatgagggttttattaaaactatatatatctccccttccttctcctcaagtcacataatatcagcactttgtgctggtcattgttgggagcttttagatgagacatctttccaggggtagaagggttagtatggaattggttgtgattctttttggggaagggggttattgttcctttggcttaaagccaaatgctgctcatagaatgatctttctctagtttcatttagaactgatttccgtgagacaatgacagaaaccctacctatctgataagattagcttgtctcagggtgggaagtgggagggcagggcaaagaaaggattagaccagaggatttaggatgcctccttctaagaaccagaagttctcattccccattatgaactgagctataatatggagctttcataaaaatgggatgcattgaggacagaactagtgatgggagtatgcgtagctttgatttggatgattaggtctttaatagtgttgagtggcacaaccttgtaaatgtgaaagtacaactcgtatttatctctgatgtgccgctggctgaactttgggttcatttggggtcaaagccagtttttcttttaaaattgaattcattctgatgcttggcccccatacccccaaccttgtccagtggagcccaacttctaaaggtcaatatatcatcctttggcatcccaactaacaataaagagtaggctataagggaagattgtcaatattttgtggtaagaaaagctacagtcattttttctttgcactttggatgctgaaatttttcccatggaacatagccacatctagatagatgtgagctttttcttctgttaaaattattcttaatgtctgtaaaaacgattttcttctgtagaatgtttgacttcgtattgacccttatctgtaaaacacctatttgggataatatttggaaaaaaagtaaatagctttttcaaaatgaaaaaaaaaa

SEQ ID NO: 1151 - protein, 632 aa, Homo sapien
MDTMMLNVRNLFEQLVRRVEILSEGNEVQFIQLAKDFEDFRKKWQRTDHELGKYKDLLMKAETERSALDVKLKHARNQVDVEIKRRQRAEADCEKLERQIQLIREMLMCDTSGSIQLSEEQKSALAFLNRGQPSSSNAGNKRLSTIDESGSILSDISFDKTDESLDWDSSLVKTFKLKKREKRRSTSRQFVDGPPGPVKKTRSIGSAVDQGNESIVAKTTVTVPNDGGPIEAVSTIETVPYWTRSRRKTGTLQPWNSDSTLNSRQLEPRTETDSVGTPQSNGGMRLHDFVSKTVIKPESCVPCGKRIKFGKLSLKCRDCRVVSHPECRDRCPLPCIPTLIGTPVKIGEGMLADFVSQTSPMIPSIVVHCVNEIEQRGLTETGLYRISGCDRTVKELKEKFLRVKTVPLLSKVDDIHAICSLLKDFLRNLKEPLLTFRLNRAFMEAAEITDEDNSIAAMYQAVGELPQANRDTLAFLMIHLQRVAQSPHTKMDVANLAKVFGPTIVAHAVPNPDPVTMLQDIKRQPKVVERLLSLPLEYWSQFMMVEQENIDPLHVIENSNAFSTPQTPDIKVSLLGPVTTPEHQLLKTPSSSSLSQRVRSTLTKNTPRFGSKSKSATNLGRQGNFFASPMLK

SEQ ID NO: 1152 - DNA, 4679 bp, Homo sapien
gagatggtgccattgcactccagcctgagcgacaagagcgaaactctctctcaaaaaaaaaaaaaaaaatccaatcctggctgggcgcagtggttcatgcctgtcatcacaacactttggaaggccaaggttagaggattgcttgagcccagaagttcaagaccagcctacgcaacatggcaagaaactttctctacaaaaaaacaaaaaaaaattttttttttgagacagggtttcactctgtcaccaggctggagagcagtggcaggatctcagctcactgcaacctctgcctcctgggcttaagtgtttctgctgcctcagcctcccaggtagctgggattataggcacgtgccaccacgctcagctaatttttgtacttcttagtagagactgtgtttcaccatgttagccaggctggtctccaactcttgacctcagataatccacctgccttggcgtgagccacagctcctggccaaaaaaaaaatttttttttaattaggcaggtgtggtggcacatgcttcaagtccaagcgatttgagaggctgaggtgggaggattgcttatgcccaggagatcgatgatgcagtgagctattgtagtgccactgccctccagcatgggcaacagagtaagaccctgtctcaaaaaataaaaataaaaataaatccaagccttttgactccacagccactctttgtattgtacgtcaagggacaggaggagcttgccgttaattgcttccgggaacctagatactaggttacactgtctttaaatttaattttctctgttccttgctcttacaggataactataatgggatgagctttgtctgtattggggctatcttggtctttgtagccttctttgaaattggaccaggccccattccctggtttattgtggccgaactcttcagccagggcccccgcccagctgcgatggcagtggccggctgctccaactggacctccaacttcctagtcggattgctcttcccctccgctgctgtaagtaaactcaccttatcttaaaaccagcctatgtaagctgacatgaagatactccttaataatacagtagtctgggcctggcatggtggctcatgcctgtaatcctagcactgtgggaggctgaggcaggtggatcacctgaggtcaggagttcaagaccagcctggccaacatggtgaaattcaaaaattagctgggcatggtggtgcatgcctgtaattccagctacttgggagatcgaggaaggagaatcgcttaaacctgggaggtggaggttgcagcgagctgagatcgcgctactgcactctagcctgctcgatggaagcaagactccatccctaaataaataaaaaaatacagcagtccctcctcttcttcagtttcagttacctgtagtctaaaaatattaaatggaaaattgcagaaataaataattcataaagtttaatttgcggccagacacagtggctcaagcctgtaattccagcactttgagaggcctaggcgggtggataacttgaggtcaggagttggggaccaacctgactatcatggtgaaaccctgtttctacaataaatacaaaaattaggccgggtgtcgtggctcatgactgtaatcccagtgagcgagatcacaccattgcggtagcacacacctgtagtcctagctactcagaagactgaggcaagagaatcacttaaacccaggaggtgttcatggtgagctgtgatcaaccttctgctctccagcctgggtgacagagcgagattccgtctcaaaaaaaaaaaaattcataaatagagatggagttgcccaggttagtctcaaactgctgggttccagtgatcctcccaccttgacctcccaaagtgctgggattatgggcgtgagccaccgcactcggcccagaaacacagattttaaaaataatactcaaaagtccaaaaatactcagtagacatttggaagcatctaactgtaatgaaatggaatgacagaaagaaaactagagagaactacagtaagttagcaatggaatcataagcgaatctgaagaaacctgttttcattaaatatggaagggttatagcttgaagcctattggaaatatgaatgtgaaggaaattgactttgtcaatgaccagatttttatatcaaccttccttttttctgtcctttctctagcactatttaggagcctacgtttttattatcttcaccggcttcctcattaccttcttggcttttaccttcttcaaagtccctgagacccgtggcaggacttttgaggatatcacacgggcctttgaagggcaggcacacggtgcagatagatctggaaaggacggcgtcatggagatgaacagcatcgagcctgctaaggagaccaccaccaatgtctaagtcgtgcctccttccacctccctcccggcatgggaaagccacctctccctcaacaagggagagacctcatcaggatgaacccaggacgcttctgaatgctgctacttaattcctttctcatcccacgcactccatgagcaccccaaggctgcggtttgttggatcttcaatggctttttaaattttatttcctggacatcctcttctgcttaggagagaccgagtgaacctaccttcatttcaggagggattggccgcttggcacatgacaactttgccagcttttcctcccttgggttctgatattgccgcactaggggatataggagaggaaaagtaaggtgcagttcccccaacctcagacttaccaggaagcagatacatatgagtgtggaagccggagggtgtttatgtaagagcaccttcctcacttccatacagctctacgtggcaaattaacttgagttttatttattttatcctctggtttaattacataattttttttttttactttaagtttcaggatacatgtgccgaatgtgcaggtttgttacataggtatatatatgccatgatggaaatatttatttttttaagcgtaattttgccaaataataaaaacagaaggaaattgagattagagggaggtgtttaaagagaggttatagagtagaagatttgatgctggagaggttaaggtgcaataagaatttagggagaaatgttgttcattattggagggtaaatgatgtggtgcctgaggtctgtacgttacctcttaacaatttctgtccttcagatggaaactctttaacttctcgtaaaagtcatatacctatataataaagctactgatttcctttggagcttttttctttaagataatagtttacatgtagtagtacttgaaatctaggattattaactaatatgggcattgtagttaatgatggttgatgggttctaattttggatggagtccagggaagagaaagtgatttctagaaagcctgttcccctcactggatgaaataactccttcttgtagtagtctcattacttttgaagtaatcccgccacctatctcgtgggagagccatccaaataagaaacctaaaataattggttcttggtagagattcattatttttccactttgttctttaggagattttaggtgttgattttctgttgtattttaactcatacctttaaaggaattccccaaagaatgtttatagcaaacttggaatttgtaacctcagctctgggagaggatttttttctgagcgattattatctaaagtgtgttgttgctttaggctcacggcacgcttgcgtatgtctgttaccatgtcactgtggtcctatgccgaatgccctcaggggacttgaatctttccaataaaccaggtttagacagtatgagtcaatgtgcagtgtagcccacacttgagaggatgaatgtatgtgcactgtcactttgctctgggtggaagtacgttattgttgacttattttctctgtgtttgttcctacagcccctttttcatatgttgctcagtctccctttcccttcttggtgcttacacatctcagaccctttagccaaacccttgtcagtgacagtattttggttcttagttctcactgttccctctgctcctggagcctttgaataaaaatgcacgtagctgaggccggatgcggtggctcacgcctgtaatcccagcactttgggaggcctaggcgggcggtcaggggttcgagaccagtctggccaacatcgtgaaaccctgtctctactaaaaatgcaaaaattagccgggcgtggtggcgggcgcctgtaatcccagctacttgggaagctgaggcgggagaatcatgtgaacccgggacgcaggggttgcagtgagcggagatcgcatcattgcactctagcctgggccacagggcgagactccgtctcaaaaaaaaaaaaatgcacatagctatcgagtgtgctttagcttgaaaaggtgaccttgcaacttcatgtcaacttctggctcctcaaacagtaggttggcagtaaggcagggtcccatttctcactgagaagattgtgaatatttccatatggattttctattgttactctggttctttgttttaaaataaaaattctgaatgtacacgacattatgggcttatttactttttgtccttcctgtaccacaaaatgagctctaaatcctgacttggctactc

SEQ ID NO: 1153 - DNA, 1236 bp, Homo sapien
ataatcttcattcctgggttctccacttcaatagtcgtggcagtgctgctgaatttgcagtttttcacatcatgaccaggattctggaagctacaaacagtttgtttttacctctgcctcctggttttcatactctgcacaccatcctcggggtccagtgtctccctttgcataacctgctgcattgcattgacagtggagtgttgcttctcactgaaacagctgtcataaggctcatgaaagatctggataatacagagaaaaatgaaaaactgaaattcagtatcattgtgcggcttcctccgcttattgggcagaagatttgtagactttgggatcatcctatgagttctaacatcatttcgcggaaccacgtgacgcgactgcttcagaactataagaaacagcctcggaattctatgattaacaagtcatcgttcagtgtagaatttctgcctctgaactacttcattgaaattctgacagatatagagtcctccaatcaagccctgtatccttttgaaggacatgacaatgtggatgcagaatttgtagaggaagcagctctgaaacacaccgcgatgcttttaggcttatgaaaaagaaaacgcaattggatctgctgctgccattttaatcttgctcattaaccttactcctctgagaattctttaacaatatttaaaattggtaacaaaaatagtttagccataattgtttagccatgtgagtttcaggttggtacacgttcagacagaactgctgtatcacattccaattttgaatagccagtgagcaatcaagtgtagagaaatgataaatggcctaagaaggcatacagtggcataaacgatgctcttcctagtagcttaataggcccacaagctagtttctgttgcactctgaaataaaatatgctttaaaaatgtagggaacagtgcttagaaaagcaaaaactaggtgtgtcattgaaataataggcataaaaattaaatgttacataagaacactatttggaaagagggtccttttaaaaactgaatttgtactaaatcagatttgccatgtccagtacagaataatttgtacttagtatttgcagcagggtttgtctttgtgaattcagatgaaacatatttatttttttttatttataaaaggttgatttaggaatattttgtcagtcattaaaaaacctgaaaacataaaaaaaaaaaaaaaaaaaaaaaaaaaaaa

SEQ ID NO: 1154 - DNA, 4459 bp, Homo sapien
ctctcagtgtctccaactttgcgctggaagaaaaacttcccgcgcgccggcagaactgcagcgcctccttttagtgactccgggagcttcggctgtagccggctctgcgcgcccttccaacgaataatagaaattgttaattttaacaatccagagcaggccaacgaggctttgctctcccgacccgaactaaagctccctcgctccgtgcgctgctacgagcggtgtctcctggggctccaatgcagcgagctgtgcccgaggggttcggaaggcgcaagctgggcagcgacatggggaacgcggagcgggctccggggtctcggagctttgggcccgtacccacgctgctgctgctcgccgcggcgctactggccgtgtcggacgcactcgggcgcccctccgaggaggacgaggagctagtggtgccggagctggagcgcgccccgggacacgggaccacgcgcctccgcctgcacgcctttgaccagcagctggatctggagctgcggcccgacagcagctttttggcgcccggcttcacgctccagaacgtggggcgcaaatccgggtccgagacgccgcttccggaaaccgacctggcgcactgcttctactccggcaccgtgaatggcgatcccagctcggctgccgccctcagcctctgcgagggcgtgcgcggcgccttctacctgctgggggaggcgtatttcatccagccgctgcccgccgccagcgagcgcctcgccaccgccgccccaggggagaagccgccggcaccactacagttccacctcctgcggcggaatcggcagggcgacgtcggcggcacgtgcggggtcgtggacgacgagccccggccgactgggaaagcggagaccgaagacgaggacgaagggactgagggcgaggacgaaggggctcagtggtcgccgcaggacccggcactgcaaggcgtaggacagcccacaggaactggaagcataagaaagaagcgatttgtgtccagtcaccgctatgtggaaaccatgcttgtggcagaccagtcgatggcagaattccacggcagtggtctaaagcattaccttctcacgttgttttcggtggcagccagattgtacaaacaccccagcattcgtaattcagttagcctggtggtggtgaagatcttggtcatccacgatgaacagaaggggccggaagtgacctccaatgctgccctcactctgcggaacttttgcaactggcagaagcagcacaacccacccagtgaccgggatgcagagcactatgacacagcaattcttttcaccagacaggacttgtgtgggtcccagacatgtgatactcttgggatggctgatgttggaactgtgtgtgatccgagcagaagctgctccgtcatagaagatgatggtttacaagctgccttcaccacagcccatgaattaggccacgtgtttaacatgccacatgatgatgcaaagcagtgtgccagccttaatggtgtgaaccaggattcccacatgatggcgtcaatgctttccaacctggaccacagccagccttggtctccttgcagtgcctacatgattacatcatttctggataatggtcatggggaatgtttgatggacaagcctcagaatcccatacagctcccaggcgatctccctggcacctcgtacgatgccaaccggcagtgccagtttacatttggggaggactccaaacactgccccgatgcagccagcacatgtagcaccttgtggtgtaccggcacctctggtggggtgctggtgtgtcaaaccaaacacttcccgtgggcggatggcaccagctgtggagaagggaaatggtgtatcaacggcaagtgtgtgaacaaaaccgacagaaagcattttgatacgccttttcatggaagctggggaatgtgggggccttggggagactgttcgagaacgtgcggtggaggagtccagtacacgatgagggaatgtgacaacccagtcccaaagaatggagggaagtactgtgaaggcaaacgagtgcgctacagatcctgtaaccttgaggactgtccagacaataatggaaaaacctttagagaggaacaatgtgaagcacacaacgagttttcaaaagcttcctttgggagtgggcctgcggtggaatggattcccaagtacgctggcgtctcaccaaaggacaggtgcaagctcatctgccaagccaaaggcattggctacttcttcgttttgcagcccaaggttgtagatggtactccatgtagcccagattccacctctgtctgtgtgcaaggacagtgtgtaaaagctggttgtgatcgcatcatagactccaaaaagaagtttgataaatgtggtgtttgcgggggaaatggatctacttgtaaaaaaatatcaggatcagttactagtgcaaaacctggatatcatgatatcatcacaattccaactggagccaccaacatcgaagtgaaacagcggaaccagaggggatccaggaacaatggcagctttcttgccatcaaagctgctgatggcacatatattcttaatggtgactacactttgtccaccttagagcaagacattatgtacaaaggtgttgtcttgaggtacagcggctcctctgcggcattggaaagaattcgcagctttagccctctcaaagagcccttgaccatccaggttcttactgtgggcaatgcccttcgacctaaaattaaatacacctacttcgtaaagaagaagaaggaatctttcaatgctatccccactttttcagcatgggtcattgaagagtggggcgaatgttctaagtcatgtgaattgggttggcagagaagactggtagaatgccgagacattaatggacagcctgcttccgagtgtgcaaaggaagtgaagccagccagcaccagaccttgtgcagaccatccctgcccccagtggcagctgggggagtggtcatcatgttctaagacctgtgggaagggttacaaaaaaagaagcttgaagtgtctgtcccatgatggaggggtgttatctcatgagagctgtgatcctttaaagaaacctaaacatttcatagacttttgcacaatggcagaatgcagttaagtggtttaagtggtgttagctttgagggcaaggcaaagtgaggaagggctggtgcagggaaagcaagaaggctggagggatccagcgtatcttgccagtaaccagtgaggtgtatcagtaaggtgggattatgggggtagatagaaaaggagttgaatcatcagagtaaactgccagttgcaaatttgataggatagttagtgaggattattaacctctgagcagtgatatagcataataaagccccgggcattattattattatttcttttgttacatctattacaagtttagaaaaaacaaagcaattgtcaaaaaaagttagaactattacaacccctgtttcctggtacttatcaaataacttagtatcatgggggttgggaaatgaaaagtaggagaaaagtgagattttactaagacctgttttactttaccttcactaacaatggggggagaaaggagtacaaataggatctttgaccagcactgtttatggctgctatggtttcagagaatgtttatacattatttctaccgagaattaaaacttcagattgttcaacatgagagaaaggctcagcaacgtgaaataacgcaaatggcttcctctttccttttttggaccatctcagtctttatttgtgtaattcattttgaggaaaaaacaactccatgtatttattcaagtgcattaaagtctacaatggaaaaaaagcagtgaagcattagatgctggtaaaagctagaggagacacaatgagcttagtacctccaacttcctttctttcctaccatgtaaccctgctttgggaatatggatgtaaagaagtaacttgtgtctcatgaaaatcagtacaatcacacaaggaggatgaaacgccggaacaaaaatgaggtgtgtagaacagggtcccacaggtttggggacattgagatcacttgtcttgtggtggggaggctgctgaggggtagcaggtccatctccagcagctggtccaacagtcgtatcctggtgaatgtctgttcagctcttctgtgagaatatgattttttccatatgtatatagtaaaatatgttactataaattacatgtactttataagtattggtttgggtgttccttccaagaaggactatagttagtaataaatgcctataataacatatttatttttatacatttatttctaatgaaaaaaacttttaaattatatcgcttttgtggaagtgcatataaaatagagtatttatacaatatatgttactagaaataaaagaacacttttggaaaaaaaaaaaaaaaaaaaaa

SEQ ID NO: 1155 - protein, 950 aa, Homo sapien
MGNAERAPGSRSFGPVPTLLLLAAALLAVSDALGRPSEEDEELVVPELERAPGHGTTRLRLHAFDQQLDLELRPDSSFLAPGFTLQNVGRKSGSETPLPETDLAHCFYSGTVNGDPSSAAALSLCEGVRGAFYLLGEAYFIQPLPAASERLATAAPGEKPPAPLQFHLLRRNRQGDVGGTCGVVDDEPRPTGKAETEDEDEGTEGEDEGAQWSPQDPALQGVGQPTGTGSIRKKRFVSSHRYVETMLVADQSMAEFHGSGLKHYLLTLFSVAARLYKHPSIRNSVSLVVVKILVIHDEQKGPEVTSNAALTLRNFCNWQKQHNPPSDRDAEHYDTAILFTRQDLCGSQTCDTLGMADVGTVCDPSRSCSVIEDDGLQAAFTTAHELGHVFNMPHDDAKQCASLNGVNQDSHMMASMLSNLDHSQPWSPCSAYMITSFLDNGHGECLMDKPQNPIQLPGDLPGTSYDANRQCQFTFGEDSKHCPDAASTCSTLWCTGTSGGVLVCQTKHFPWADGTSCGEGKWCINGKCVNKTDRKHFDTPFHGSWGMWGPWGDCSRTCGGGVQYTMRECDNPVPKNGGKYCEGKRVRYRSCNLEDCPDNNGKTFREEQCEAHNEFSKASFGSGPAVEWIPKYAGVSPKDRCKLICQAKGIGYFFVLQPKVVDGTPCSPDSTSVCVQGQCVKAGCDRIIDSKKKFDKCGVCGGNGSTCKKISGSVTSAKPGYHDIITIPTGATNIEVKQRNQRGSRNNGSFLAIKAADGTYILNGDYTLSTLEQDIMYKGVVLRYSGSSAALERIRSFSPLKEPLTIQVLTVGNALRPKIKYTYFVKKKKESFNAIPTFSAWVIEEWGECSKSCELGWQRRLVECRDINGQPASECAKEVKPASTRPCADHPCPQWQLGEWSSCSKTCGKGYKKRSLKCLSHDGGVLSHESCDPLKKPKHFIDFCTMAECS

SEQ ID NO: 1156 - DNA, 868 bp, Homo sapien
ggcgggcagaagttggaaacatgcggctgtcggtcgctgcagcgatctcccatggccgcgtatttcgccgtatgggcctcggtcccgagtcccgcatccatctgttgcggaacttgctcacagggctggtgcggcacgaacgcatcgaggcaccatgggcgcgtgtggacgaaatgaggggctacgcggagaagctcatcgactatgggaagctgggagacactaacgaacgagccatgcgcatggctgacttctggctcacagagaaggatttgatcccaaagctgtttcaagtactggcccctcggtacaaagatcaaactgggggctacacaagaatgctgcagatcccaaatcggagtttggatcgggccaagatggcagtgatcgagtataaagggaattgcctcccacccctgcctctgcctcgcagagacagccaccttacactcctaaaccagctgctgcagggtttgcggcaggacctcaggcaaagccaggaagcaagcaaccacagctcccacacagctcaaacaccagggatttaactggatctgaagagtctgcagcccttaatcagtacccatgatcacaggcctttggagcacttttactctctgagaagaactggagctagagatgtaaaatggacagtcttgatggggttgagaaccttctggggagccagatgaccctctctttgcacaatagataaaagtctttatatgaatatatataaatttatttattttttccttcctgtgggatttctggagaatgagaattatccaaatgctcagtctacctgagatagtaaattcatggcttatgcttctggtccttaaatttgggttatttttggttagtg

SEQ ID NO: 1157 - protein, 175 aa, Homo sapien [sequence omitted]

SEQ ID NO: 1158 - DNA, 1352 bp, Homo sapien
ggggggaaacggaagtgagcggcggggtcgactgacggtaacggggcagagaggctgttcgcagagctgcggaagatgaatgccagaggacttggatctgagctaaaggacagtattccagttactgaactttcagcaagtggaccttttgaaagtcatgatcttcttcggaaaggtttttcttgtgtgaaaaatgaacttttgcctagtcatccccttgaattatcagaaaaaaatttccagctcaaccaagataaaatgaatttttccacactgagaaacattcagggtctatttgctccgctaaaattacagatggaattcaaggcagtgcagcaggttcagcgtcttccatttctttcaagctcaaatctttcactggatgttttgaggggtaatgatgagactattggatttgaggatattcttaatgatccatcacaaagcgaagtcatgggagagccacacttgatggtggaatataaacttggtttactgtaatagtgtgctgttcatggaaaccgagggctgcatcttgtttatagtcatctttgtactgtaatttgatgtacacaacattaaaagtactgacacctgagaatttctgctcaagtagtatcagtgatcatttaaaatttggaggggtctttggtttacagccatgtgacaattaaaagcactaaagggagatcatgttaaagctcttaatttatattaaaacagtagcctttgtctttaaaaaagttgttgctcatgaatattataaaatgatctacaggtttcaattcaacctgtttctaggtttttttgtaaatttagttttgattaagcattataagcatttgagtctataaactttatagtagcatctttcagaataaacatttttaattgatttcagtggcaactctcaaattgattacaatatgagatatatcagtgtcgtccattaacactcataagaataatatttactgtgtcagtgctattttaggattatagttattgtttgattatttcaggttgaaaagtagaagttccaaggttttgattttggtctggtctttaagtgaaaaattaaagcaaccagtagatgtaggttaaacttttacttcatagacttaatatgtgattaatatattgccaagcaacactgttaaagaaaagtaaaactcattttttcttgttcttaatttatatattacaagatactgtaaggtattctttatgaagttgatatataaaaatttacatttttagaacattagtgaatggatcatcttttacaattaaaagtatattttgattatcagtttcttagcaaaaaaaaaaaaaaaaaaaaaaaaaaaaaa

SEQ ID NO: 1159 - protein, 141 aa, Homo sapien
MNARGLGSELKDSIPVTELSASGPFESHDLLRKGFSCVKNELLPSHPLELSEKNFQLNQDKMNFSTLRNIQGLFAPLKLQMEFKAVQQVQRLPFLSSSNLSLDVLRGNDETIGFEDILNDPSQSEVMGEPHLMVEYKLGLL

SEQ ID NO: 1160 - DNA, 4113 bp, Homo sapien
tgaggcgcgggaggcccgcgccccgcggctcgctgtgcgtgggagggcgcgagcgaacgcgggcgaggagcggccgagccgctgaagaggagctgggcgccggccgcccggccgcgctcggcccgcggatcgcctccgcccggtcttcgccggccccggcccctggcgagatgccgtgtggggaggattggctcagccacccgctgggaatcgtgcagggattcttcgcccaaaatggagttaatcctgactgggagaagaaagtaattgagtattttaaggaaaagctgaaggaaaataatgctcctaagtgggtaccatcactgaacgaagttccccttcattatttgaaacctaatagttttgtgaaatttcgttgcatgattcaggatatgtttgaccctgagttttacatgggagtttatgaaacggttaaccaaaacacaaaagcacatgttcttcattttggaaaatatagagatgtagcagagtgtgggcctcaacaagaacttgatttaaactctccacgaaataccactttggaaagacagactttctattgtgttccggtgcctggggaatctacgtgggtaaaagaagcctatgttaatgcaaaccaagctcgagtcagtccctcaacatcctacactcctagtcgccacaagaggagttatgaagatgatgacgatatggacctacagcccaataagcagaaagaccaacatgcaggtgccagacaagcagggagtgttggtggtcttcaatggtgtggagagccaaaacgtttagaaactgaagcttctactgggcaacagctgaactctctgaacttgtcttctccttttgatttgaattttccattgccaggagagaagggccctgcatgccttgtgaaggtttatgaagattgggattgtttcaaagtaaatgacattcttgagctatatggcatactgtctgtggatcctgtgctgagtatactgaataatgatgaaagggatgcctctgcactgctggatccgatggagtgcacagacacagcagaggagcagagagtacacagtcctcctgcttcattagtgccgagaattcatgtgatcttagcccagaagttgcaacacatcaacccattattgcctgcctgccttaacaaagaggagagcaaaacctgtaagtttgtttcaagtttcatgtccgaattgtctccagtcagagcagaacttcttgggttccttactcatgcccttctgggggatagtttggctgctgaataccttatattacatctcatctccacagtatatacaagaagagatgtccttccactaggaaaatttacagttaacttgagtggttgcccacggaatagtaccttcacagaacacttgtatcgaattattcaacatcttgttccagcatcttttcgtctgcagatgactatagagaacatgaaccatttgaaattcattccccacaaagactacacagccaatcgcttggtcagtgggctcctccagctgcccagcaatacttcccttgtaatcgatgagactctcctggaacaggggcagctggataccccaggtgttcataatgtgacagccctgagcaacctcataacgtggcagaaggtggattatgacttcagctaccatcagatggaattcccctgcaatattaacgttttcattacttcggaggggaggtcactcctcccggcagactgccagattcacttacagccccagctaattccaccaaacatggaggagtacatgaacagccttctctcagcggtgctgccttccgtgctgaacaaattccgcatttatctaactcttttgagattcttggaatatagcatatctgatgaaataaccaaggcagttgaagatgactttgtggaaatgcggaagaacgaccctcagagcatcactgctgatgatcttcaccagctgctcgtggtggctcggtgtctgtctctcagtgctggtcagacaacgctgtcaagagaacgatggctgagagcaaagcagctagagtctttaagaagaacgaggcttcagcagcaaaaatgtgtgaatggaaatgaactttaaagatgtaatacctatgaagagtaatgggcaaactgtagccacataattgtaaaattcagatattcatttataccacattgttttataggtaatttctatcacaaaccagtgacatttcctgaaatcaagcctggtaacacctgatgtttatatgatattcagtaaggacttttaccttactgatttcatggagcttttgaagtttgttttataataattatataaattagtaatgatgtaaaaaaagtatttgatattaaaagtttaatattgataatgttgctgattgtaccatttccttagcttcagctgagtcataggccagactgttgaaatgctgaaatgaagaaggttgttgcagtttcaaagtcagaggaatcgtgcttcggatttcttatgttttctagttctctgtttttccagttcacagtgggttggggtgcattcagtagtccatctttggggaacggaggcgtacttgccattgattcacatgactacatgaaattctgtactgtcatttcccagatgtttggccacagaaactttttcccacttaacatttgttaacagcctgcaaaactaaacttgtacatggcagtggttcccagacttttgtattttatggaccggtagtaatatttccaaaaatctggggtactataaggttgccaatttaccttgccaagtaatccgaataaatcactgtattatcaccatttttttcataaaaggaaaggacaatctatctctgaataagaggagtcctttaaacggaatgaatgtggcttttgggggcaaaagaaaccaagacactacattgtctttattttctcctatcccagtgcatttgagaaccatgcataagggaatgctgtgctacaaagctgtgcccaaatatgaaaacaaaataggaaacttaaaaagcaataccccctttagaaagtttttattttcttaaatgtcattgagttgctttgattctattggatttttggcattttttatgggatcatcagttggttccaagtatgttagatcagctaacatctgctactccagtaacagcctcgtacaactgcaggtaggttttctccagaccaattagttttaatagagcaaactaacaacagactgtagtagcatggttatggcaaccagaatcttcagaaaggttaggacattactttttaagctgtcagtggtatcaaataacttacctagttggaggcagataaaggatcccttacgttttttcctataaggcctaaattgaaattgttaaccaaggaaacagggtcagccttgaaaaatcaaggaattcattgtacctaataactgaagtaaaaataactagttgttcaacttttcctaaactcaaatctatttttataaacaaatgtaaataatgtttatattagagttgaactggttttcatttttataactggtagactagaccttccttaaacttttagaaataaaatgaaggcttcactggatttgtgaggataaaatacattttctttaattgtcctagagcaaagtacattagtcaccatgtgttttttgtgccaatgtaacttgtaatttaccaaagaaaaatacatacattgcttggtcttgcagaaaagttcccttgaaagaacctttccaataaataaaacgtcccaaattagcagtaccttgggctgtttttcatgagtaagaagattcaccatcccatgtgatctgtgtggaaaaagaccatgtcctcttggtggaagacatgagagagctgaactgaagtggaggaggtggtgcaagagggaccttcctgctcaaggcccgcccaggcagcggaatagagtgcagtgcttggctgcagaaaccctttgtccctcacctatatatacacggacagtcaagtttgttgctctaacgtaaggcacagcgttaatcctgtatggccaggaaactgagtagactcctgtgtaaccctgtttggaactttgccttcttaaaatgatttttc

SEQ ID NO: 1161 - protein, 642 aa, Homo sapien
MPCGEDWLSHPLGIVQGFFAQNGVNPDWEKKVIEYFKEKLKENNAPKWVPSLNEVPLHYLKPNSFVKFRCMIQDMFDPEFYMGVYETVNQNTKAHVLHFGKYRDVAECGPQQELDLNSPRNTTLERQTFYCVPVPGESTWVKEAYVNANQARVSPSTSYTPSRHKRSYEDDDDMDLQPNKQKDQHAGARQAGSVGGLQWCGEPKRLETEASTGQQLNSLNLSSPFDLNFPLPGEKGPACLVKVYEDWDCFKVNDILELYGILSVDPVLSILNNDERDASALLDPMECTDTAEEQRVHSPPASLVPRIHVILAQKLQHINPLLPACLNKEESKTCKFVSSFMSELSPVRAELLGFLTHALLGDSLAAEYLILHLISTVYTRRDVLPLGKFTVNLSGCPRNSTFTEHLYRIIQHLVPASFRLQMTIENMNHLKFIPHKDYTANRLVSGLLQLPSNTSLVIDETLLEQGQLDTPGVHNVTALSNLITWQKVDYDFSYHQMEFPCNINVFITSEGRSLLPADCQIHLQPQLIPPNMEEYMNSLLSAVLPSVLNKFRIYLTLLRFLEYSISDEITKAVEDDFVEMRKNDPQSITADDLHQLLVVARCLSLSAGQTTLSRERWLRAKQLESLRRTRLQQQKCVNGNEL

SEQ ID NO: 1162 - DNA, 1706 bp, Homo sapien
tgttcttgagcccagcttcttctcgtctcccaccccagcttcccggcattggaagaagggaccgtcctcttccttgtcttggccacccaaatcctggtatcgaaagggttgaacggaccggaagtgtgcagcagcgacgggtccccagctaatcgacgccggaagtagcaattactagacaagcattccgccgccggcttcgctatggcggcaattcccccagattcctggcagccacccaacgtttacttggagaccagcatgggaatcattgtgctggagctgtactggaagcatgctccaaagacctgtaagaactttgctgagttggctcgtcgaggttactacaatggcacaaaattccacagaattatcaaagacttcatgatccaaggaggtgacccaacagggacaggtcgaggtggtgcatctatctatggcaaacagtttgaagatgaacttcatccagacttgaaattcacgggggctggaattctcgcaatggccaatgcggggccagataccaatggcagccagttctttgtgaccctcgcccccacccagtggcttgacggcaaacacaccatttttggccgagtgtgtcagggcataggaatggtgaatcgcgtgggaatggtagaaacaaactcccaggaccgccctgtggacgacgtgaagatcattaaggcatacccttctgggtagacttgctaccctcttgagcagctcttctgagatggccccagtgaaccagcttctagatgacatagaatgacatgtaatgctaaatttcattttggctttgcaagtcatgaagcttaggaggcctggcatcttgggtgagttagagatggaagtacattttaataggatgcttcttttctcttcccccagtgcctaggttgccagagcatttgcacaaatgcccctgtttatcaataggtgactacttactacacatgaaccataatgctgcttcttgtgcatgtctgctctgatatacgtcgaacaatgtagcagccactgtcatttctcagtggttttgcctaaccaaacttcttcctaaggagatttatattctggcctacacagcagtccttgatggctgacagccacagaattccaaaccaagtagtgtctgtcagccctcttaactctgtgcacgccctatttcagtcttttacatttgttcttctagggaatgtatgcatctctatatatattttccctctcaaaaccagaacatcaacagtgctgtttctgacacttcagacatcccacgcaaagccacattgaatttttgccaaatgaaaaacacatccaacaatcaagtttctaagaaggtgtcaagtggggaataataataatgtataataatcaagaaattagtttattaaaaggaagcagaagcattgaccattttttcccagagaagaggagaaatctgtagtgagcaaaggacagaccatgaatcctccttgagaagtagtactctcagaaaggagaagcgccactcaagttcttttaacccaagactttagagaaattaggtccaagatttttatatgttcagttgtttatgtataaaaataactttctggattttgtggggaggagcaggagaggaaggaagttaatacctatgtaatacatagaaacttccacaataaaatgccattgatggttgaaaaaaaaaaaaaaaaaaa

SEQ ID NO: 1163 - protein, 166 aa, Homo sapien
MAAIPPDSWQPPNVYLETSMGIIVLELYWKHAPKTCKNFAELARRGYYNGTKFHRIIKDFMIQGGDPTGTGRGGASIYGKQFEDELHPDLKFTGAGILAMANAGPDTNGSQFFVTLAPTQWLDGKHTIFGRVCQGIGMVNRVGMVETNSQDRPVDDVKIIKAYPSG

SEQ ID NO: 1164 - DNA, 2684 bp, Homo sapien
aataacctggagccggcggcgtaggttggctctttagggcttcaccccgaagctccaccttcgctcccgtctttctggaaacaccgctttgatctcggcggtgcgggacaggtacctcccggctgctgcgggtgccctggatccagtcggctgcaccaggcgagcgagacccttccctggtggaggctcagagttccggcagggtgcatccggcctgtgtgtggcgcgaggcagggaagccggtacccgggtcctggccccagcgctgacgttttctctcccctttcttctctcttcgcggttgcggcgtcgcagacgctagtgtgagcccccatggcagatacgaccccgagcggcccccaaggggcgggcgctgtgcaattcatgatgaccaataaactggacacggcaatgtggctttctcgcttgttcacagtttactgctctgctctgtttgttctgcctcttcttgggttgcatgaagcagcaagcttttaccaacgtgctttgctggcaaatgctcttaccagtgctctgaggctgcatcaaagattaccacacttccagttaagcagagcattcctggcccaggctttgttagaggacagctgccactacctgttgtattcactcatctttgtaaattcctatccagttacaatgagtatcttcccagtcttgttattctctttgcttcatgctgccacatatacgaaaaaggtccttgacgcaaggggctcaaatagtttacctctgctgagatctgtcttggacaaattaagtgctaatcaacaaaatattctgaaattcattgcttgcaatgaaatattcctgatgcctgcgacagtttttatgctttttagtggtcaaggaagtttgctccaaccttttatatactatagatttcttacccttcgatattcgtctcgaagaaacccatattgtcggaccttatttaatgaactgaggattgttgttgaacacataataatgaaacctgcttgcccactgtttgtgagaagactttgtctccagagcattgcctttataagcagattggcaccaacagttccatagtttaacatctagttaagctacaaatatagtataagcattattagcagctggtacttctgctaggggttgtaaattccaggtgttacactgacctcaatccaatttacataatttacataaatgcatctcggtggaaaaataatcattttcttggcatgttaaatcaagcttaaaaagttttgagaaaattttactgtgctgtgttgctaatggttaaagaagtctgtatctagtgataaatataccagtttttttaaaaagatgctgttgtgcctatatcatgaagtacattaatttctcatgtaaaaaaaatagctctaaaatttgtttcaacctaattggtaacctgagtttatatctggcatgaattcattatggtgatacacatatgtgaattcagtacattttgagacagtattctaccattcagtaattttggttaatgattttaacacttctcagtgtatttaatttcaaattgtttttttaattggttttatgctgctttgttaggacagatgtgttttgaatgtaccattataagaagaattctatgtatcttaaactatgatcttctaaaattttatttccgtaagtacttctgtggccttgagtattttttaaaaggctcaactgtaagcctcttagccagttggataaatatttggggtcacctagccattgaaagcagaaagcagtagtgacacagctttcccttcaaagagccattgagaaacatttctcaaacaggaaatccttcttttactaatgtggacatatagattattcgtattatagtttgtagaactacctagttcagaatcttgactgccagttttcttggtttcttaggcttgaattttcatagacaattgcaacagtttagatgccttttgaaaggaatgtaatgaagattcagcatctgactatatgtgtgtctatcctgaaataataatggagagtatactgtagattacatgtttacccatcaaatctgacttaaaaggttaaatggaaggttttataggtaaggtaattgattgggaatggggtagggggaggagttgtgggggaataatgtgcatttcagtctcaacgcatagataaatttaggggaattggatgcattattcaactttgatttgggttgtaaaatgtgttaaatcctgttcattgaactcccatcaactcttatgaaattcatgctgatcttcattaccgttgcatgattggaaatgtttaaaacattgtacagttttagtatagagaaatgtaatggtttttgtgaccagtttctgtctgcatgtaatttggatttctcaaatacattcattagtaatttatcagtaacattagttttatttttgttcatctccttatctataaaaaggggatattcttaggataaatacatgaaaaattatacttgatagcttaactataatcagctatttttgtatttttgtaatatttgtccactaagctggagaagcagcctcatacagttgattttgtgtatgtggctagtcttattgtcactatgtaagtaatccaatggttttagaaactaaactttctagagcaataaaatgactataatgttaagt

SEQ ID NO: 1165 - protein, 247 aa, Homo sapien
MADTTPSGPQGAGAVQFMMTNKLDTAMWLSRLFTVYCSALFVLPLLGLHEAASFYQRALLANALTSALRLHQRLPHFQLSRAFLAQALLEDSCHYLLYSLIFVNSYPVTMSIFPVLLFSLLHAATYTKKVLDARGSNSLPLLRSVLDKLSANQQNILKFIACNEIFLMPATVFMLFSGQGSLLQPFIYYRFLTLRYSSRRNPYCRTLFNELRIVVEHIIMKPACPLFVRRLCLQSIAFISRLAPTVP

SEQ ID NO: 1166 - DNA, 3334 bp, Homo sapien
gcacgagccccgggctgccggcgcgggcgccgcggcacgtccacaggctgggtcgcgaggtggcgatcgctgagaggcaggagggccgaggcgggcctgggaggcggcccggaggtggggcgccgctggggccggcccgcacgggcttcatctgagggcgcacggcccgcgaccgagcgtgcggactggcctcccaagcgtggggcgacaagctgccggagctgcaatgggccgcggctggggattcttgtttggcctcctgggcgccgtgtggctgctcagctcgggccacggagaggagcagcccccggagacagcggcacagaggtgcttctgccaggttagtggttacttggatgattgtacctgtgatgttgaaaccattgatagatttaataactacaggcttttcccaagactacaaaaacttcttgaaagtgactactttaggtattacaaggtaaacctgaagaggccgtgtcctttctggaatgacatcagccagtgtggaagaagggactgtgctgtcaaaccatgtcaatctgatgaagttcctgatggaattaaatctgcgagctacaagtattctgaagaagccaataatctcattgaagaatgtgaacaagctgaacgacttggagcagtggatgaatctctgagtgaggaaacacagaaggctgttcttcagtggaccaagcatgatgattcttcagataacttctgtgaagctgatgacattcagtcccctgaagctgaatatgtagatttgcttcttaatcctgagcgctacactggttacaagggaccagatgcttggaaaatatggaatgtcatctacgaagaaaactgttttaagccacagacaattaaaagacctttaaatcctttggcttctggtcaagggacaagtgaagagaacactttttacagttggctagaaggtctctgtgtagaaaaaagagcattctacagacttatatctggcctacatgcaagcattaatgtgcatttgagtgcaagatatcttttacaagagacctggttagaaaagaaatggggacacaacattacagaatttcaacagcgatttgatggaattttgactgaaggagaaggtccaagaaggcttaagaacttgtattttctctacttaatagaactaagggctttatccaaagtgttaccattcttcgagcgcccagattttcaactctttactggaaataaaattcaggatgaggaaaacaaaatgttacttctggaaatacttcatgaaatcaagtcatttcctttgcattttgatgagaattcattttttgctggggataaaaaagaagcacacaaactaaaggaggactttcgactgcattttagaaatatttcaagaattatggattgtgttggttgttttaaatgtcgtctgtggggaaagcttcagactcagggtttgggcactgctctgaagatcttattttctgagaaattgatagcaaatatgccagaaagtggacctagttatgaattccatctaaccagacaagaaatagtatcattattcaacgcatttggaagaatttctacaagtgtgaaagaattagaaaacttcaggaacttgttacagaatattcattaaagaaaacaagctgatatgtgcctgtttctggacaatggaggcgaaagagtggaatttcattcaaaggcataatagcaatgacagtcttaagccaaacattttatataaagttgcttttgtaaaggagaattatattgttttaagtaaacacatttttaaaaattgtgttaagtctatgtataatactactgtgagtaaaagtaatactttaataatgtggtacaaattttaaagtttaatattgaataaaaggaggattatcaaattcatatatgataaaagtgaatgttctaagtctctcaaactagcgttttatgtaataatatgtaatataaataaaactatggtaaatgtgacaagcatttaataggaaaatgctaaggaggcctcataaatgacccataattaccaacgtagaatttttcagtacatttagggttgctggatttagcaaataaaaataaagattgcccagttagatttgaatttcagataaacaattagttttttaatattttacatggaatatttggaaaatacttatactaaaaaattatttgtttgaaattcacatttaactgggagtcttgtattttatctggcaatcctaaaatacattggtatgaaacaaatcacttttagaagtatattgctattttgattgggttgtttttgtgtgtagaaacgtacaataacaactcaaaggcacaggagatttctaaacattgtgaaaagttgaatagattatatatttattctcataatactttcactaatactaaataaaatttggggaacactttttatttttatataatttccaatttacagaaaagtttcaaaaatagtacaaagagctctcttacccagattcactaattgttcatacgtgctttatctttcatgctttctctgtacacacacacacacacacaaatttttcctcaatcatttgaaagtcagttataggcatcatgccccttaaaccctaaatacttcagtgtgtaatactgaataattactaaaaatgattttctcagaaaaaaaaactcccacaattctggaactataatactgtaagccttagaataaataatactttcaagttccaatctaaagttctttttgagttttgttgcccgttttatgcttgatgtgtatagtaatagggtaggctatttattttattaaaattttttttagagacaaggttttgctgtgttgcccaagctggaacttgaacgactgggctgaagtgatcttcccacctcagcctcccaagtagctgggaatacaggtgtctgccaccatacccagtttcatttttgttttttatacccgaagttcatttcctttgtctccctaaaactgaactgtaattttgggaggttttcattagtggaagctcttcatttataaagctatttgaaggggtttaggaatttatatcacatggtaattgtagagaaaaagaagctatatacctcaaaatcgtgccctctttacatatgtcttatcaggtataacatgttgaaatgtcacattagtagtaaagtggggtttatttatatagtggttaagaaatgtcagtttacactgctgtatacttcttcttctgtgtccctaaggcctggtacagtgccaagcacatacttggtatccaataaatatttgttggatgaaaaaaaaaaaaaaaaaaaa

SEQ ID NO: 1167 - protein, 468 aa, Homo sapien
MGRGWGFLFGLLGAVWLLSSGHGEEQPPETAAQRCFCQVSGYLDDCTCDVETIDRFNNYRLFPRLQKLLESDYFRYYKVNLKRPCPFWNDISQCGRRDCAVKPCQSDEVPDGIKSASYKYSEEANNLIEECEQAERLGAVDESLSEETQKAVLQWTKHDDSSDNFCEADDIQSPEAEYVDLLLNPERYTGYKGPDAWKIWNVIYEENCFKPQTIKRPLNPLASGQGTSEENTFYSWLEGLCVEKRAFYRLISGLHASINVHLSARYLLQETWLEKKWGHNITEFQQRFDGILTEGEGPRRLKNLYFLYLIELRALSKVLPFFERPDFQLFTGNKIQDEENKMLLLEILHEIKSFPLHFDENSFFAGDKKEAHKLKEDFRLHFRNISRIMDCVGCFKCRLWGKLQTQGLGTALKILFSEKLIANMPESGPSYEFHLTRQEIVSLFNAFGRISTSVKELENFRNLLQNIH

SEQ ID NO: 1168 - DNA, 4221 bp, Homo sapien; identical to SEQ ID NO: 1005

SEQ ID NO: 1169 - protein, 730 aa, Homo sapien; identical to SEQ ID NO: 1006

SEQ ID NO: 1170 - DNA, 2832 bp, Homo sapien
gtgcaccgtcggcaacctgcttcctggaaccgtgtatcgcttccgggtgagggctctgaatgatggagggtatggtccctattctgatgtctcagaaattaccactgctgcagggcctcctggacaatgcaaagcaccttgtatttcttgtacacctgatggatgtgtcttagtgggttgggagagtcctgatagttctggtgctgacatctcagagtacaggttggaatggggagaagatgaagaatccttagaactcatttatcatgggacagacacccgttttgaaataagagacctgttgcctgctgcacagtattgctgtagactacaggccttcaatcaagcaggggcagggccgtacagtgaacttgtcctttgccagacgccagcgtctgcccctgaccccgtctccactctctgtgtcctggaggaggagccccttgatgcctaccctgattcaccttctgcgtgccttgtactgaactgggaagagccgtgcaataacggatctgaaatccttgcttacaccattgatctaggagacactagcattaccgtgggcaacaccaccatgcatgttatgaaagatctccttccagaaaccacctaccggatcagaattcaggctataaatgaaattggagctggaccatttagtcagttcattaaagcaaaaactcggccattaccacccttgcctcctaggctagaatgtgctgctgctggtcctcagagcctgaagctaaaatggggagacagtaactccaagacacatgctgctgaggacattgtgtacacactacagctggaggacagaaacaagaggtttatttcaatctacagaggacccagccacacctacaaggtccagagactgacggaattcacatgctactccttcagaatccaggcagcaagcgaggctggagaagggcccttctcagaaacctataccttcagcacaaccaaaagtgtcccccccaccatcaaagcacctcgagtaacacagttagaaggaaattcatgtgaaattttatgggagacggtaccatcaatgaaaggtgaccctgttaactacattctgcaggtattggttggaagagaatctgagtacaaacaggtgtacaagggagaagaagccacattccaaatctcaggcctccagaccaacacagactacaggttccgcgtatgtgcgtgtcgtcgctgtttagacacctctcaggagctaagcggagccttcagcccctctgcggcttttgtattacaacgaagtgaggtcatgcttacaggggacatggggagcttagatgatcccaaaatgaagagcatgatgcctactgatgaacagtttgcagccatcattgtgcttggctttgcaactttgtccattttatttgcctttatattacagtacttcttaatgaagtaaacccaacaaaactagaggtatgaattaatgctacacattttaatacacacatttattcagatactcccctttttaaagcccttttgttttttgatttatatactctgttttacagatttagctagaaaaaaaatgtcagtgttttggtgcacctttttgaaatgcaaaactaggaaaaggttaaactggatttttttttttaaaaaaaagaaaaaaaaagaagaaaagtataccagataccaaaagccagctttcttatgttttcctttaaattttcagatttaccttcattctgttttcactgatgtcttttgcaagcctttgattttttttttttttgttacagtttagtaatttatattcaccagtcacttcatatgtcttgaacatctgtatctgtaaacatgaatcaccgtgtgtgtacttacagggctaggatttcagtgttgtcagagtattaccacacagcaacagcaacatacagaagatatgttcactcagataagactgccctaaacaaccattttgtcactcagttatttaactgtgtttagctcatttaaatcaaaatgtgtactttaatctaaaatgttttaataatctgtatttcttataattttaacactatgagctgcctgtataagaaatcaagtaaccagaatgcacctataaattatggagcattgtagattttaccacatcaattcatagcagtaactttaagagggcattgtgcaatagttagttgttttcttgttcagctattttaaaggctgctttaacttgtttgtttgtctttgtatataactacttctaatctaatcactagagttattatattctgttatgtttgaccagaattatatgacaagaactggtgacagtttagtgcctctgcccattgtccatgatttacactaattgtgagcagtcttcttatgtgtcagctcattatttttgaaacatttgcctttaggctgttctttgaggtatcaatgaagtgattgaatttcaataccttaattcagtgcacataatactaatgtaacagcagatgaaaattgataaaacccaaaagagagtcatctaaatttgtagttcctatttctgtgggtttgcctggccatggttggagagggaatggtgtttgatggtaaacacagggtgtttggggatcaaggagcctagattctctccctggatctgtcactaacttgctgcgtgacctgaacacgtcactttacctctctgtgcctcagttttcccatgcatgaaaaataaaataaaataaaacggggattctaatgttaaaaaaaaaaaaaaaaaaaaaaaaaaaaaaaaaaaaaaaaaaaaaaaaaaaaaaaaaaaaaaaaaaaaaacaaaaaaaaaaaaaaaaa

SEQ ID NO: 1171 - DNA, 1544 bp, Homo sapien
gcgctcccggaacgcgcgcaccgcagacggcgcggatcgcagggagccggtccgccgccggaacgggagcctgggtgtgcgtgtggagtccggactcgtgggagacgatcgcgatgaacacggtgctgtcgcgggcgaactcactgttcgccttctcgctgagcgtgatggcggcgctcaccttcggctgcttcatcaccaccgccttcaaagacaggagcgtcccggtgcggctgcacgtctcgcggatcatgctaaaaaatgtagaagatttcactggacctagagaaagaagtgatctgggatttatcacatttgatataactgctgatctagagaatatatttgattggaatgttaagcagttgtttctttatttatcagcagaatattcaacaaaaaataatgctctgaaccaagttgtcctatgggacaagattgttttgagaggtgataatccgaagctgctgctgaaagatatgaaaacaaaatattttttctttgacgatggaaatggtctcaagggaaacaggaatgtcactttgaccctgtcttggaacgtcgtaccaaatgctggaattctacctcttgtgacaggatcaggacacgtatctgtcccatttccagatacatatgaaataacgaagagttattaaattattctgaatttgaaacaacatatttttatacttaatgaattgtatctcattaatctcttcccttacatcttcatgtattgttggtttgttttttggttttgggttttttttttttttttttggtataagaactaacatcaaaaggcctgtttaaagggaaaggttaatgggctacttaatattatgaacaaaacaaaaaaacaaggctgccacagtggaatattatcttacaagaataagaactacataaaacagatttgtaaaaaatacatatttgaagtattccctgtatttccattattctttatggaatataaagtaagcatgaaaggtagttaaaactttcaggtgcctgtagagtcataataactgtattttatgccttgcattcacgcaaattcacattggatgtgatttaaaagtagacattctctttttcctcttttaggatatgtttgattactggaaaattaatatggttatttgttagaagtctggtttataaaaaagccaaaagtgatggaatttattccatttgtcttaggaaggcccataatacttgtttttcttacatgtgactagcaactttctccacttaaagactaaatacctctttatatgatgtaaattattctaattcattttaaaatcttttaggtcagcaaaatgtgtgtcttcagtgctttctctaaaaacgttcctttatagctttgtacttttttttttagcgttgccattgaaagttaaaatgtttgcatggtttaccctctgagttatgtttcttctagtgagcatgcctgctgtcactaagtgaattatttactactttttgtaggtctatattttaataattattgggataataataaaaaaaaaaaaaaaaaa

SEQ ID NO: 1172 - protein, 180 aa, Homo sapien
MNTVLSRANSLFAFSLSVMAALTFGCFITTAFKDRSVPVRLHVSRIMLKNVEDFTGPRERSDLGFITFDITADLENIFDWNVKQLFLYLSAEYSTKNNALNQVVLWDKIVLRGDNPKLLLKDMKTKYFFFDDGNGLKGNRNVTLTLSWNVVPNAGILPLVTGSGHVSVPFPDTYEITKSY

SEQ ID NO: 1173 - DNA, 1931 bp, Homo sapien
tttgctaaagccaccataaaggaaatagttgtgtggcccatgttgaggccagacatctttactggtttaaggggaccccctaaaggaattttgctctttggtcctcctgggactggtaaaactctaattggcaagtgcattgctagtcagtctggggcaacattctttagcatctctgcttcatccttaacttctaaatgggtaggtgagggggagaaaatggtccgtgcattgtttgctgttgcaaggtgtcagcaaccagctgtgatatttattgacgaaattgattccttgttatctcaacggggagatggtgagcatgaatcttctagaaggataaaaacagaatttttagttcaattagatggagcaacaacatcttctgaagatcgtatcctagtggtgggagcaacaaatcggccacaagaaattgatgaggctgcccggagaagattggtgaaaaggctttatattcccctcccagaagcttcagccaggaaacagatagtaattaatctaatgtccaaagagcagtgttgcctcagtgaagaagaaattgaacagattgtacagcagtctgatgcgttttcaggagcagacatgacacagctttgcagggaggcttctcttggtcctattcgcagtttacaaactgctgacattgctaccataacaccggatcaagttcgacccatagcttacattgattttgaaaatgcttttagaactgtgcgacctagtgtttctccaaaagatttagagctttatgaaaactggaacaaaacttttggttgtggaaagtaagtgggatacttggaatcaaggcatctctgtagtacagtcttctttattttttagcatagaaagttggggatgtgttaattgtatttttaagaatatattctaagttctgtacttcaaataatagcacagattttacatctgattgacatagtgtatgttaatgtaagttttgctttccagtgattacctgatacgtaagcctatttgaacaaagtgagaatgaacttttgtttctaagaagtctttatcttgaagctatataacatgaaaagtgagctcaaattttttttagttgaagattacatataaagttgtgtctgattaatattcatcttttattgaagaaagtgccttctgatggccacataattcttaatgtcagctagtataatggtttacatttggacaaagtattgcttagtgttatttaagtagatttaagatctcaaagctaaagtgccaatttttactttcttcagccaatttgttacctcttttatggttttaaatttttatcaggactaacattttcagaaatagcaaggtgtgatctagtattagattcacagaactgaaaggttaattaagaatgttggttattttcacgggagcgtgtgatatttaacattaatattttatttgacactacagcctgtaatactgctctctttcaaaaacaagttttcagatttttataacagacccattttgttttatgaaacatgttcattacagaaacatgagaaaatagagataagtaaaaagaataaaagtcactattatcctaccactttgcgggacacactattaatatttaagcatagattcttccagatgttttgttttatacagcagtaggattgtgtaatgtattctctcttgtagcctattcttcaaagcgtatcttcactttccatgttaacataaatgtccttttatgattgtctaggattccatggatggatggaatataattgagtcatctggtagagcgcatataggacaggacgctaggttgtttatcttttgtttattgtaaaggaactatgtgggatgcatttggtgatctttttaaaaaatgtataaatttcttgagtaattcctggattaaagaatatgcacttctt

SEQ ID NO: 1174 - protein, 254 aa, Homo sapien
MLRPDIFTGLRGPPKGILLFGPPGTGKTLIGKCIASQSGATFFSISASSLTSKWVGEGEKMVRALFAVARCQQPAVIFIDEIDSLLSQRGDGEHESSRRIKTEFLVQLDGATTSSEDRILVVGATNRPQEIDEAARRRLVKRLYIPLPEASARKQIVINLMSKEQCCLSEEEIEQIVQQSDAFSGADMTQLCREASLGPIRSLQTADIATITPDQVRPIAYIDFENAFRTVRPSVSPKDLELYENWNKTFGCGK

SEQ ID NO: 1175 - DNA, 1794 bp, Homo sapien
cacatataataatagcaactcctggtcgactgattgaccacttgaaacctttcgtattttccaagtgctggcaagcgcttcctgcgcaggccgaggcgacctggagtttgtgacgctgtgatggtctagaggctggagattcaagatctgggtgccatcattttctggttctgttgatgaccctcttccaggttacatacagcttacatcttgcatcctcaagcgtttttcttataaggctaaaaattcacaaagcatatatcaatgaatcaggaggatctagatccggatagtactacagatgtgggagatgttacaaatactgaagaagaacttattagagaatgtgaagaaatgtggaaagatatggaagaatgtcagaataaattatcacttattggaactgaaacactcaccgattcaaatgctcagctatcattgttaattatgcaagtaaaatgtttaaccgctgaactcagtcaatggcagaaaaaaacacctgaaacaattcccttgactgaagacgttctcataacattaggaaaagaagagttccaaaagctgagacaagatcttgaaatggtactgtccactaaggagtcaaagaatgaaaagttaaaggaagacttagaaagggaacaacggtggttggatgaacagcaacagataatggaatctcttaatgtactacacagtgaattgaaaaataaggttgaaacattttctgaatcaagaatctttaatgaactgaaaactaaaatgcttaatataaaagaatataaggagaaactcttgagtaccttgggcgagtttctagaagaccattttcctctgcctgatagaagtgttaaaaagaaaaagaaaaacattcaagaatcatctgtaaacctgataacactgcatgaaatgttagagattcttataaatagattatttgatgttccacatgatccatatgtcaaaattagtgattccttttggccaccttatgttgagctgctgctgcgtaatggaattgccttgagacatccagaagatccaacccgaataagattagaagctttccatcagtaaaaggatgttttcttttttcacacagtaaaaattcttatcattcaaggatattggaaccacaggactatttggataaaaaacattatttgcaaattaatgcgcatagtacttttattgcaaaatggcatgtgctgccatctattattcatttttaaatggtcatttcttattcagtgagtgctttagtgttttaaactatatggataagaatgcaggtagataatattctaggcataaaacatttaatgtaccttacctcatgcaatattctttggattctttgttgatttatgatattgctaatataatattttcttaaaatatataacaatatcttttatgcatttgagttccagctggtgcttctttatatttagaaattataatgggaaggtcatttaatttacagatggttttaaaattgaggtaatatctgaggtggcataatttaaaaatatttagcaaatttgtttcatatatactgtcttatttctagatttgtttaaaattggaatatgaaaaactaatggataaagctagcataaaattgatattttagtttgtattattaatatatcatgttaccttatatattaatctactcttgattctgctaattattaccaacaaaattgtattcatgacattttattaatcctctgtgaattttctgtaaataaaattatttctgaaaatctctaaaaaaaaaaaaaaaaaaaa

SEQ ID NO: 1176 - protein, 269 aa, Homo sapien
MNQEDLDPDSTTDVGDVTNTEEELIRECEEMWKDMEECQNKLSLIGTETLTDSNAQLSLLIMQVKCLTAELSQWQKKTPETIPLTEDVLITLGKEEFQKLRQDLEMVLSTKESKNEKLKEDLEREQRWLDEQQQIMESLNVLHSELKNKVETFSESRIFNELKTKMLNIKEYKEKLLSTLGEFLEDHFPLPDRSVKKKKKNIQESSVNLITLHEMLEILINRLFDVPHDPYVKISDSFWPPYVELLLRNGIALRHPEDPTRIRLEAFHQ

SEQ ID NO: 1177 - DNA, 3032 bp, Homo sapien; identical to SEQ ID NO: 1051

SEQ ID NO: 1178 - protein, 134 aa, Homo sapien; identical to SEQ ID NO: 1052

SEQ ID NO: 1179 - DNA, 3016 bp, Homo sapien
cagcccacctcttgcatcgtcacctacaggtatctaagcaatggatccaagccctggaggttggtgagagccatgtattacccctagatgaaattggacaagagaccatgaccgtaaccctcctcgatgccaatcactgtcctggttctgtcatgtttctctttgaaggatattttggaaccatcctctacacaggtgattttcgatacacaccatccatgctaaaggagccagccctgacactggggaaacagatccatactttatacctagacaacaccaattgcaatccagccctggttcttccttcccgacaagaagctgcccaccagattgtccagctcattcgaaaacacccacaacataacataaagattggactctacagcctgggaaaggaatcactgctggagcagctggccctggagtttcagacctgggtggtattgagtcctcggcgcctggagttggtacagctactgggcctggcagatgtgttcacagtggaggagaaggctggccgcatccatgcagtagaccatatggagacctgccattccaacatgctgcgttggaaccagacccaccctacgattgctatccttcccacaagccgaaaaatccacagctcccaccctgatatccacgtcatcccttactctgaccattcctcttactccgagcttcgtgcctttgtcgcagcactgaagccttgccaggtggtgcccattgtaagtcggcggccctgtggaggctttcaggacagtctgagccccaggatctccgtgcccctgattccggactctgtacagcaatacatgagttcttcctctagaaaaccaagccttctctggctgttagaaaggaggctaaagaggccgagaacccaaggtgttgtgtttgaatcccctgaggaaagtgctgatcaatctcaagctgacagagactcaaagaaggccaagaaagagaaactttctccctggcctgcggaccttgaaaagcagccttcccaccatcctttgcggatcaagaagcagttgttcccagatctctatagcaaagaatggaacaaggcagtgcctttctgtgagtctcaaaagagggtgactatgttgacggccccactgggattttcagtgcacttaaggtctacagatgaggagtttatttctcaaaaaaccagggaggaaattggtttagggtcccccttggtacccatgggagatgatgatggaggtccagaagccacagggaatcagagtgcctggatgggccatggttctcccctgtcccacagcagcaagggcacccctcttctagctactgaattcaggggtctagcactcaaatatcttctgactccagtgaactttttccaggcagggtattcttccaggagatttgaccagcaagtggaaaaataccataaaccctgctgaagacaggagagtacagaatgacaacattgagcccacactgcagttttgaagatagtaactgatggctggtgggaaagagtttgtttttggggcctacttttctatctttacaagactcttatgggcccaccgtggagcagcacttcccaaaacttgttcactggggtcctcgtgcctatggaatccttctttttataactaagtttaagaaatactttttttataaaatctttggagtatgcgtgagcaaattaaaagttctttgaagtcctacagtaacttaatctgtttaaccttgtttaacccagtatttctcaaacttttgtgaacatgcaatcatcttatgtgggtacagaaagaggtaaagagtctgaatcaaaaaggaccaggttattgctgttgctgttttgtggtgtcatgagccattctccatgtccccttctccctcttctcagatcaaaatccctagggagttctatttttaaaattatgaactatggcgctgcatgcttcaatcctgaacgtcactgacttgctgtgaccatccaaataattttcctgtctctgcctctgggagggaacaggaagcgatgaagaggtcttggaacagtagtgaaaattctacctctatgtccttcatgaggatgtgcagtatcccagtatcactgggatccatgtggaacagagccagctggggggttgggcagctctctccaaggcagtacctagagcccagctgaacaacaaggctttgggtgtgaagggactccccagcctggagaccctatttggctgaaacagttacaaaatatcaaatgtgttgtcagatattcctccaattgttcacatagctgggatatttgttgctcccctcaccccttggattatgtagggagccagtgcacacagcctgtttgttttagtatccaaggaagagaccaaggagccagctggcgggaaggggtgggggtgtgcagtctgccctgtccttctgctcataacctgacaaaatgccaaactagtaagcaggatagctgataccacggctatgagggagtaggctccgagagggcacagacttgtggagctgggcgtctggatcaaaactgctttgggatggaacctcgagccctagcagtgaagaagattccatttcttgtccaggggatttaaaagagttttctgctttgagagagaaatagagagtttagaaagcaattgctcttgggaaagctatacacagctctgttttgtcaatgacctttgttgtaagtctcccaacgtcctattaggagccacagcaggtgaggcatttggtgcagcaggaaacatggggactgcctaggctcgaatctgtggcaccctgagcaattacttaaattgtggagcctagttcctcatctgtaagatggacttgagattcctacctctcatgattactatggagattgaataattggtaaaattctcctagctcagtgactgccacaggatgggtctttcagattttggttctctttagcttctggttcttgaaagaaattgatctgtatataacataagaaactttgaaagtc

SEQ ID NO: 1180 - protein, 443 aa, Homo sapien [sequence omitted]

SEQ ID NO: 1181 - DNA, 3712 bp, Rattus norvegicus
ccggttcccgcggtcgcagctccagccgcctcctccgcgcagccgccgcctcagctgctcgctctgtgggtcggtcctctccggcacttgggctccagtcgcgccctccaagcccttcaggccgccccagtgtcctcctccttctccggccagacccagccccgcgaagatggtggaccgcgagcaactggtgcagaaagcccggctggccgagcaggcggagcgctacgacgacatggccgcggccatgaagaacgtgacagagctgaatgagccactgtcgaatgaggaacgaaaccttctgtctgtggcctacaagaacgttgtgggggcacgccgctcttcctggagggtcatcagtagcattgagcagaagacatctgcagacggcaatgagaagaagattgagatggtccgtgcgtaccgggagaagatagagaaggagttggaggctgtgtgccaggatgtgctgagcctgctggataactacctgatcaagaattgcagcgagacccagtacgagagcaaagtgttctacctgaagatgaaaggggactactaccgctacctggctgaagtggccaccggagagaaaagggcgacggtggtggagtcctccgagaaggcctacagcgaagcccacgagatcagcaaagagcacatgcagcccacccaccccatccgattaggcctggctcttaactactccgtcttctactatgagatccagaacgccccagagcaagcgtgccacttggccaagaccgcgttcgacgacgccatcgccgagcttgacaccctcaacgaggactcctacaaggactccacgctcatcatgcagctcctccgcgacaacctcacgctctggacgagcgaccagcaggacgacgatggcggcgaaggcaacaattaaggccccaggggaactggcagcgcacgcggatgctactactgcagtctttatttttttcccatgagttgggggtcgggtgggggagggaaagggagggatgaccttcccagggagaaacccacgacctgtcctgtctttgatcgcctctttgacatttttgccaaaataccactagtggaaagtcaggctagctgtgctggtattggaatagcagcctcacactggcgtctggactgttctgtagattcatgcaagtggagctgtctgtctctaatttaacttattgctagataatagggttttcagatgaaaagaaaacttaaagaggaatggccctcattcagtaagttctgtggttccagtaaggatttttatgtacatacgctctcgtctctcgttttgggtactttctatctcatctgtctcggctctgcatgttttccagggtgtagcctacagacatggaacagtgtaaatcccagactgacagacttagaacctgaggtctcattcatccttatggtttaggccttgccagttttccgaagtctctgattagttgacagtattaacactaaattgcagtttacagtatttctacattacagccatatgtaacatcaagccatcgattgtgtacttttcctttgctagttgtttgggctttaacatccttattcagccttatccaggttggttttgctgttgatcggtctcctaggctaaatgagaatgaaagcgacttcaggtttttggttcataggtgctcggcaggtggctgtgggatttttttttttggtccttctttcctcttaacgtaaatccaccaccaaaattattaatcctcttgagagaaacgtgaaacgccacaaaaatagagaaaattcaggtctgtatgtcatggatcgtgttggtattttcagagaacatcccgcttctgaagctgctgcagctccctcctcagggatcacactgccgtcacccactctgcactggggcgtttcctactgcgcctcgtgctggcggacgcagctgggtgcagaagctgtggggtcggagaggcgtttggagaaggtctgtggtgcagtgtgtgaaaattcaggtgctagaagcctactggtagaaaaacccaaaaggaagagctatatccttaaccattctgtccaatttcgggagccttgtcagtgtgtcagtttttcctccccgaagacactccttccccaagtaattgtaggaagataaaaaaactgttaccagataacaaacacttaactcctatttgaccagaactttttcctctcgagatagttttttctttttaatgaaaaaagcataggaattggagattggcttgtctcacgcagccagtgcacatttggaattgacggaaacaacgttgctatttccacccatttgttttcggcagccttaaggccctcattctcatttcgggtgaatctgtctatctgtgaacgtggcccgcatgtgcattcttttttttatatatataaagtcagtgacgaggcactcccgagacgtgtaatgacaccacacttgttttctttgtttctttgttttatttaggcaagaagaggtgtgagtaattgaggaaaaactgacagatgcttttgctaataccaaaattgagcttacaattaggaactgagtatgtgtaacaggatacaggtgacagtgaagatagaagaaccacgatgaccacagactcaatgtgctctgtaacatcgcacagtttacccagcatgactttccttaggaggccccctcctcacgctagagtaaaagtcccagttaagtgaagcctaccagaagaactagtagaagaagctttgccgcttttgtgcctctcacaggcgcctaaagtcattgccatgggaggaagacgatttggggggggagggggggggcagggtaggtggggctttccctaatttatcttcatgtccagtgagcagtgttgcgtttttccttgtagcatttggaaatgatttactggaattacaaaacctatttttcctttaaatttcagctttggctctggctgctttttagaataatgcaagataaaaatcacacctgagggctgaaaacggagagggaatgggagacttgatatttaagcagcttgaatggtttttcttttctttatttttaaagaaatgcacttgcctatgatactgtctctccagtgaaatgattactcctccattactctattgatacaatattgtgcatgctagtgttgtatttctatacagtagcttgaaattgattaacttatactgtaggtgttatgtattcctatgacaaaaaaaattaagtcttcaaattttttaaaggttttttttttttaatttaatttttccttttgggggtaaagtttgctctaccaaatagtgattgtaacaaattgatctgttttggatgttgctatagtgacatgcagttatatattttgtttttaaaagggggggagcaaaagaaacaccagtgttagcttaatcttaatgtctggtgtttgtcatggtgaaattataactattacagtgttggagaacaacaaatatgttctctgaatgagcctttgtgctttttgtcatgttatgcagtgaactatttttaaggtctaatcagtgattatttttccagctccgtgtttctctaaggaattatttcacacacggaccatctttagcagtttcctcagtgatggaatatcatgaatgtgagtcattatgtagctgtcgtacattgagcaaataaacttacagatctgacgcc

SEQ ID NO: 1182 - protein, 247 aa, Rattus norvegicus
MVDREQLVQKARLAEQAERYDDMAAAMKNVTELNEPLSNEERNLLSVAYKNVVGARRSSWRVISSIEQKTSADGNEKKIEMVRAYREKIEKELEAVCQDVLSLLDNYLIKNCSETQYESKVFYLKMKGDYYRYLAEVATGEKRATVVESSEKAYSEAHEISKEHMQPTHPIRLGLALNYSVFYYEIQNAPEQACHLAKTAFDDAIAELDTLNEDSYKDSTLIMQLLRDNLTLWTSDQQDDDGGEGNN

SEQ ID NO: 1183 - DNA, 1108 bp, Homo sapien
agcagtggcccaaagaggagcagcagacaagagtgcagtggtggctgccgccgcaccagcctcagtggcagatgacacaccaccccccgagcgtcggaacaagagcggtatcatcagtgagcccctcaacaagagcctgcgccgctcccgcccgctctcccactactcttcttttggcagcagtggtggtagtggcggtggcagcatgatgggcggagagtctgcttgacaaggccactgcggctgcagcctggccttccctgttggccaatgggatgacctggcggcggccatggcggtggacaaaagcaaccctacctcaaagcacaaaagtggtgctgtggccagcctgctgagcaaggcagagcgggccacggagctggcagccgagggacagctgacgctgcagcagtttgcgcagtccacagagatgctgaagcgcgtggtgcaggagcatctcccgctgatgagcgaggcgggtgctggcctgcctgacatggaggctgtggcaggtgccgaagccctcaatggccagtccgacttcccctacctgggcgctttccccatcaacccaggcctcttcattatgaccccggcaggtgtgttcctggccgagagcgcgctgcacatggcgggcctggctgagtaccccatgcagggagagctgcctctgccatcagctccggcaagaagaagcggaaacgctgcggcattgtgcgcgccctgccggcggcgcatcaactgcgagcagtgcagcagttgtaggaatcgaaagactggccatcagatttgcaaattcagaaaatgtgaggaactcaaaaagaagccttccgctgctctggagaaggtgatgcttccgacgggagccgccttccggtggtttcagtgacggcggcggaacccaaagctgccctctccgtgcaatgtcactgctcgtgtggtctccagcaagggattcgggcgaagacaaacggatgcacccgtctttagaaccaaaaatattctctcacagatttcattcctgtttttatatatatattttttgttgtcgttttaacatctccacgtccctagcataaaaaaaaaaaaaaaaaaaaaaaaaaaaaaa

SEQ ID NO: 1184 - protein, 198 aa, Homo sapien
MAVDKSNPTSKHKSGAVASLLSKAERATELAAEGQLTLQQFAQSTEMLKRVVQEHLPLMSEAGAGLPDMEAVAGAEALNGQSDFPYLGAFPINPGLFIMTPAGVFLAESALHMAGLAEYPMQGELPLPSAPARRSGNAAALCAPCRRRINCEQCSSCRNRKTGHQICKFRKCEELKKKPSAALEKVMLPTGAAFRWFQ

SEQ ID NO: 1185 - DNA, 1701 bp, Mus musculus
ggaacaaaagctggagctccaccgcggtggcggccgctctagaactagtggatcccccgggctgcaggaattcggcacgagcagaagagggggctagctagctgtctctgcggaccaggggagaccccgcgcccccccggtgtgaggcggcctcacagggccgggtgggctggcgagccgacgcggcggcggaggaggctgtgaggagtgtgtggaacaggacccgggacagaggaaccatggctccgcagaacctgagcaccttttgcctgttgctgctatacctcatcggggcggtgattgccggacgagatttctataagatcttgggggtgcctcgaagtgcctctataaaggatattaaaaaggcctataggaaactagccctgcagcttcatcccgaccggaaccctgatgatccacaagcccaggagaaattccaggatctgggtgctgcttatgaggttctgtcagatagtgagaaacggaaacagtacgatacttatggtgaagaaggattaaaagatggtcatcagagctcccatggagacattttttcacacttctttggggattttggtttcatgtttggaggaacccctcgtcagcaagacagaaatattccaagaggaagtgatattattgtagatctagaagtcactttggaagaagtatatgcaggaaattttgtggaagtagttagaaacaaacctgtggcaaggcaggctcctggcaaacggaagtgcaattgtcggcaagagatgcggaccacccagctgggccctgggcgcttccaaatgacccaggaggtggtctgcgacgaatgccctaatgtcaaactagtgaatgaagaacgaacgctggaagtagaaatagagcctggggtgagagacggcatggagtacccctttattggagaaggtgagcctcacgtggatggggagcctggagatttacggttccgaatcaaagttgtcaagcacccaatatttgaaaggagaggagatgatttgtacacaaatgtgacaatctcattagttgagtcactggttggctttgagatggatattactcacttggatggtcacaaggtacatatttcccgggataagatcaccaggccaggagcgaagctatggaagaaaggggaagggctccccaactttgacaacaacaatatcaagggctctttgataatcacttttgatgtggattttccaaaagaacagttaacagaggaagcgagagaaggtatcaaacagctactgaaacaagggtcagtgcagaaggtatacaatggactgcaaggatattgagagtgaataaaattggactttgtttaaaataagtgaataagcgatatttattatctgcaaggtttttttgtgtgtgtttttgtttttattttcaatatgcaagttaggcttaatttttttatctaatgatcatcatgaaatgaataagagggcttaagaatttgtccatttgcattcggaaaagaatgaccagcaaaaggtttactaatacgtctccctttggggatttaatgtctggtgctgccgcctgagtttcaagaattaaagctgcaagaggactccaggagcaaaagaaacacaatatagagggttggagttgttagcaatttcattcaaaatgccaactggagaagtctgtttttaaatacattttgttgttattttt

SEQ ID NO: 1186 - protein, 358 aa, Mus musculus
MAPQNLSTFCLLLLYLIGAVIAGRDFYKILGVPRSASIKDIKKAYRKLALQLHPDRNPDDPQAQEKFQDLGAAYEVLSDSEKRKQYDTYGEEGLKDGHQSSHGDIFSHFFGDFGFMFGGTPRQQDRNIPRGSDIIVDLEVTLEEVYAGNFVEVVRNKPVARQAPGKRKCNCRQEMRTTQLGPGRFQMTQEVVCDECPNVKLVNEERTLEVEIEPGVRDGMEYPFIGEGEPHVDGEPGDLRFRIKVVKHPIFERRGDDLYTNVTISLVESLVGFEMDITHLDGHKVHISRDKITRPGAKLWKKGEGLPNFDNNNIKGSLIITFDVDFPKEQLTEEAREGIKQLLKQGSVQKVYNGLQGY

SEQ ID NO: 1187 - DNA, 2229 bp, Homo sapien; identical to SEQ ID NO: 1104

SEQ ID NO: 1188 - protein, 370 aa, Homo sapien; identical to SEQ ID NO: 661

SEQ ID NO: 1189 - DNA, 839 bp, Homo sapien
cgcccgtcggggtctcgtttcagcagccaatgggtctgcaccttcgtcctcgtcagcattttgtctaatcgcggcctgtgacctcgaaggcggggagcagagggagatacagaaaccgacagggccaggcgccggtggctccgaagcggggaagtgggacaagatggtttacatctcgaacggacaagtgttggacagccggagtcagtctccatggagattatctttgataacagatttcttctggggaatagctgagtttgtggttttgtttttcaaaactctgcttcagcaagatgtgaaaaaaagaagaagctatggaaactcatctgattccagatatgatgatggaagagggccaccaggaaaccctccccgaagaatgggtagaatcaatcatctgcgtggccctagtccccctccaatggctggtggatgaggaaggtaaatgtctgctctaagaagcagacaaccggacatgcgcattcatagcagaaggaaaccatcaagaagtggaaggctgaccatgatgagcagtagatgaatgtgtatgtctaaacaaggactgctctgtgtcctcacagatgaatgaggtcatgctgggaattccctctgcagggaactggcctgactgacatgcagttccataaatgcagatgtttgtctcattacctttttgtatagtttattaaagtattaatatagttttaataagtaaatatttttaggttgcagaatggactcctcatctttatattcacgaaaaagcaatctgaagaaaacaaataaaagcctgtgtatttagcaaaaaaaaaaaaaaaaaaaaaaaaaaaaaaaaa

SEQ ID NO: 1190 - protein, 145 aa, Homo sapien [sequence omitted]

SEQ ID NO: 1191 - DNA, 1590 bp, Homo sapien
atgttggtgctgtttgaaacgtctgtgggttacgccatctttaaggttctaaatgagaagaaacttcaagaggttgatagtttatggaaagaatttgaaactccagagaaagcaaacaaaatagtaaagctaaaacattttgagaaatttcaggatacagcagaagcattagcagcattcacagctctgatggagggcaaaatcaataagcagctgaaaaaagttctgaagaaaatagtaaaagaagcccatgaaccgctggcagtagctgatgctaaactaggaggggtcataaaggaaaagctgaatctcagttgtatccatagtcctgttgttaatgaacttatgagaggaattcgttcacaaatggatggattaatccctggggtagaaccacgtgaaatggcagctatgtgtcttggattggctcacagcctgtctcgatatagattgaagtttagcgctgataaagtagacacaatgattgttcaggcaatttccttgttagatgacttggataaagaactaaacaactacattatgcgatgtagagaatggtatggctggcatttccctgaattaggaaaaattatttcagataatttaacatactgcaagtgtttacagaaagttggcgataggaagaactatgcctctgccaagctttctgagttgctgccagaagaagttgaagcagaagtgaaagcagctgcagagatatcaatgggaacagaggtttcagaagaagatatttgcaatattctgcatctttgcacccaggtgattgaaatctctgaatatcgaacccagctctatgaatatctacaaaatcgaatgatggccattgcacccaatgttacagtcatggttggggaattagttggagcacggcttattgctcatgcaggttctcttttaaatttggccaagcatgcagcttctaccgttcagattcttggagctgaaaaggcacttttcagagccctcaaatctagacgggatacccctaagtatggtctcatttatcatgcttcactcgtgggccagacaagtcccaaacacaaaggaaagatttctcgaatgctggcagccaaaaccgttttggctatccgttatgatgcttttggtgaggattcaagttctgcaatgggagttgagaacagagccaaattagaggccaggttgagaactttggaagacagagggataagaaaaataagtggaacaggaaaagcattagcaaaaacagaaaaatatgaacacaaaagtgaagtgaagacttacgatccttctggtgactccacacttccaacctgctctaaaaaacgcaaaatagaacaggtagataaagaggatgaaattactgaaaagaaagccaaaaaagccaagattaaagttaaagttgaagaagaggaagaagaaaaagtggcagaagaagaagaaacatctgtgaagaagaagaagaaaaggggtaaaaagaaacacattaaggaagaaccactttctgaggaagaaccatgtaccagcacagcaattgctagtccagagaaaaagaagaaaaagaaaaaaaagagagagaacgaggattaa

SEQ ID NO: 1192 - protein, 529 aa, Homo sapien
MLVLFETSVGYAIFKVLNEKKLQEVDSLWKEFETPEKANKIVKLKHFEKFQDTAEALAAFTALMEGKINKQLKKVLKKIVKEAHEPLAVADAKLGGVIKEKLNLSCIHSPVVNELMRGIRSQMDGLIPGVEPREMAAMCLGLAHSLSRYRLKFSADKVDTMIVQAISLLDDLDKELNNYIMRCREWYGWHFPELGKIISDNLTYCKCLQKVGDRKNYASAKLSELLPEEVEAEVKAAAEISMGTEVSEEDICNILHLCTQVIEISEYRTQLYEYLQNRMMAIAPNVTVMVGELVGARLIAHAGSLLNLAKHAASTVQILGAEKALFRALKSRRDTPKYGLIYHASLVGQTSPKHKGKISRMLAAKTVLAIRYDAFGEDSSSAMGVENRAKLEARLRTLEDRGIRKISGTGKALAKTEKYEHKSEVKTYDPSGDSTLPTCSKKRKIEQVDKEDEITEKKAKKAKIKVKVEEEEEEKVAEEEETSVKKKKKRGKKKHIKEEPLSEEEPCTSTAIASPEKKKKKKKKRENED

SEQ ID NO: 1193 - DNA, 1635 bp, Homo sapien; identical to SEQ ID NO: 1089

SEQ ID NO: 1194 - protein, 445 aa, Homo sapien; identical to SEQ ID NO: 1090

SEQ ID NO: 1195 - DNA, 2814 bp, Homo sapien
gcggccgcggggccccggacaagggtccgcagagctgcagccttcgagggccagccctctccgagtccggggctgggtcccaccagtgacaaggcggcagccccgcgcacaccaaagagaaggcggctgtggcggcagcggcagccccagccatgctgtgttatgtgacgaggccggacgcggtgctgatggaggtggaggtggaggcgaaagccaacggcgaggactgcctcaaccaggcatatctttttcttgcacatcaaggaggccctcttggcaggccacctcttgtgttccccagagcaggcagtggaactcagtgccctcctggcccagaccaagtttggagactacaaccagaacactgccaagtataactatgaggagctctgtgccaaggagctctcctctgccaccttgaacagcattgttgcaaaacataaggagttggaggggaccagccaggcttcagctgaataccaattttgccagattgtgtcggcaatggaaaactatggcatagaatggcattctgtgcgggatagcgaagggcagaaactgctcattggggttggacctgaaggaatctcaatttgtaaagatgactttagcccaattaataggatagcttatcctgtggtgcagatggccacccagtcaggaaagaatgtatatttgacggtcaccaaggaatctgggaacagcatcgtgctcttgtttaaaatgatcagcaccagggcggccacgcggctctaccgagcgataacagagacgcacgcattctacaggtgtgacacagtgaccagcgccgtgatgatgcagtatagccgtgacttgaagggccacttggcatctctgtttctgaatgaaaacattaaccttgggccaagaaattatgtctttgatatttaaaagaacatcaaaggaggtgtatgaccatgccaggaggctctgtacaatgctggcgttgtggacctcgtttcaagaacaaccagagcccttcacactcgcctctgaagtcctcagaaagcagcatgaactgcagcagctgcgagggcctcagctgccagcagacccgggtgctgcaggagaagctacgcaagctgaaggaagccatgctgtgcatggtgtgctgcgaggaggagatcaactccaccttctgtccctgtggccacactgtgtgctgtgagagctgcgccgcccagctacagtcatgtcccgtctgcaggtcgcgtgtggagcatgtccagcacgtctatctgccaacgcacaccagtcttctcaatctgactgtaatctaatctgttgtgcttttgttggacttggcatgtttccatgaactgcactattataaactattaaaatgatagattgtggagaaagtaattattccaacacccatctgccatgcgatgttaaaaaaaaaaaaaaaggaagaaaaataacacagctactcctcactgcaaaaacatatccatgcgtagaatcaacaactccagtcatgggaccaggaggagctctgggacgcagacacattccttggatgttgattttttttatgatctagtaaaggaataggtaaagtctttgatgtcagtgaagtggcaacatagccaaaaagttgggtaccttttaggaaatgatgttgtaagtctccttaatgtatcctgaggtaagtttcctactggcagcagattttgtaagaattacttttaagaatttcattctttttgtatggtcatggagctccaaccatttttaataggaaagtcttttgtaaaattgttgtcgttttaatgtcatttctgtctttataacttgatcaagaatgattggaaggcaaacaggtttacaaatcaattctgtgacttttaaaaagttgacaatgttgtcagatttaaaccagtgtggctagtaaaaagcagctcactcaatgttgggtggctccctattcctttacgctccccctatccctaccccacaagcctttcgattataaaatactaccaatcttgttataagattactgtggagtagtcaagtactccccgggccttctgagctggtggaatattttatttcagactgaaaacagagagcactctccttgggaagggaaagcggcttgctgagtgagagatggagcctcatggtgtacaactgagggtagttaactcatcacttctcccaagcactcgatcccagcttcacccactggtgttgctttgcttgaactgttcaagccttttatagccttaccataagtatttagatatggtgtccttttctgtttttggggggggagttttgttgtgtttttttaaagtaagtgcttaagtattaactttgggttgtcccctctgtatgtttcgaaggggttttggttctttttgcttctgttttcttaaacatgttttccactcccacttgggcattttggaagctggtcagctagcaggttttctgggatgtcgggagacctagatgaccttatcgggtgcaatactagctaaggtaaagctagaaacctacactgtcactttactgagatttctgagtatacttttcatattgccttaatgtagcagtaatgtgtttatgcatttgtttctttgcacagacattttgtcaaatattaaaactctacttttttatggcacatattagcatataagcctttattccaagaggtatttattttttcacttgtaaaaaaataatgtttccacgtaaagaactctgttatatcctagaggactctgtcttttatattcgggataataaagactttaaagcaaaaaaaaaaaaaaaaaa

SEQ ID NO: 1196 - protein, 135 aa, Homo sapien [sequence omitted]

SEQ ID NO: 1197 - DNA, 1343 bp, Homo sapien
agaagggaaggtagacatcaggttctccctggagacttttcgttttcatttacgctgcggaaactgacgtttttgcctaacaccccatgtaatgtaaacgtataggcttgagtacgtgtccggccgcatgtgtagtgaaccctaaagctttcctaattgtagttagcatcgtccctaagcggaacgattttccgtgaacatgatttgtacttttctacgagccgtacagtatacggagaagctgcacaggtcctcggcaaagcgattgcttttgccatacatcgtgcttaacaaagcgtacttgaagactgagcccagtttgagatgtgggcttcaatatcaaaagaaaacgctgcgacctagatgtattcttggagtcacccagaaaaccatctggacgcagggaccgagcccccgaaaagcaaaggaggatggcagcaaacaagtgtctgtgcacaggagtcagagagggggaaccgccgtcccaacatcacaaaaagtgaaagaagccggaagagattttacctatttaatagtggtgctttttggaatcagcattacaggtggcttgttttacacgattttcaaagaacttttttcttcatccagtcctagcaagatatatgggagagccttagaaaaatgcagatcacatcctgaggtgatcggtgtctttggtgagtctgttaaaggctatggggaggtgacaaggcggggtcgccggcagcatgtcaggttcactgaatatgtaaaagatgggctgaaacacacgtgtgtgaaattctacattgagggctctgagccagggaagcaaggaacggtgtatgcgcaagtgaaagagaacccaggaagtggtgaatatgattttcgatatatatttgtagaaattgaatcttatcctagaagaactattatcattgaagataatcgatcccaagatgattaataatcaagcaagcaggtttctgatggatgttgaatggcgtggactcgctactccgttcttcacagctgccttccagaatgtgttcaaaagaaagacaagaaggagtgtatggcttataaagtgaatctaatacagtatttgttgcatttaaacaaactagacattttcttacggaaaaattatgaaatacagcatattttatgttctcccattgactcaatcatgacaatatttctgctttaacaccatctttcgtgattagaaatgtttgttattggaaatgttacaccatgtaaataaaggaaatagattttagtattgtattcattttatattatagaactgcataatgtctgcagaataaaattaaaactaacaaataaaaaaaaaaaaaaaa

SEQ ID NO: 1198 - protein, 248 aa, Homo sapien
MICTFLRAVQYTEKLHRSSAKRLLLPYIVLNKAYLKTEPSLRCGLQYQKKTLRPRCILGVTQKTIWTQGPSPRKAKEDGSKQVSVHRSQRGGTAVPTSQKVKEAGRDFTYLIVVLFGISITGGLFYTIFKELFSSSSPSKIYGRALEKCRSHPEVIGVFGESVKGYGEVTRRGRRQHVRFTEYVKDGLKHTCVKFYIEGSEPGKQGTVYAQVKENPGSGEYDFRYIFVEIESYPRRTIIIEDNRSQDD

SEQ ID NO: 1199 - DNA, 1209 bp, Homo sapien
cagggctgggcggcggcggcggcggcggtcatggaacgccaagaggagtctctgtccgcgcggccggccctggagaccgaggggctgcgcttcctgcacaccacggtgggctccctgctggccacctatggctggtacatcgtcttcagctgcatccttctctacgtggtctttcagaagctttccgcccggctaagagccttgaggcagaggcagctggaccgagctgcggctgctgtggaacctgatgttgttgttaaacgacaagaagctttagcagctgctcgactgaaaatgcaagaagaactaaatgcgcaagttgaaaagcataaggaaaaactgaaacaacttgaagaagaaaaaaggagacagaagattgaaatgtgggacagcatgcaagaaggaaaaagttacaaaggaaatgcaaagaagccccaggaggaagacagtcctgggccttccacttcatctgtcctgaaacggaaatcggacagaaagcctttgcggggaggaggttataacccgttgtctggtgaaggaggcggacttgctcctggagacctggacgcagaggcccgtcatctggcggatgaggctaagaatcttgttagtgtcacttttgacattagcaagatgaacccttaaccctcgattcaattgccttacgcacgcttttcacagtgactagccaaggggaggtggggttgatttctgttcctaactacacctgcatatgtcagggctccagtcagcaaaaggtatagatgttgcctctaggcatgaggtcattggtcacattctacttggagacagtgattgcattcattgatttcatggttaattgctagttggtaggtaaaggcctctagatgattagcaatcttgataaaagaggcctagtaatgttcttttgaggttagaaatccttgctgctaggacagtctctgtgacaggttgcgttgaatgatgtcttccttatcaatggtgagcccaccagtgaggattactgatgtggacagttgatggggtttgtttctgtatatttatttttatgtacagaactttgtaaaaacgaaactatttaaaaaacaagaataacatttttagcatctttattcaaggagatttatggacttcaatttgtctatcaaacattaaatagctttttattacaacctccaaaaaaaaaaaaaaaaaaaaaaaaaaaaa

SEQ ID NO: 1200 - protein, 204 aa, Homo sapien
MERQEESLSARPALETEGLRFLHTTVGSLLATYGWYIVFSCILLYVVFQKLSARLRALRQRQLDRAAAAVEPDVVVKRQEALAAARLKMQEELNAQVEKHKEKLKQLEEEKRRQKIEMWDSMQEGKSYKGNAKKPQEEDSPGPSTSSVLKRKSDRKPLRGGGYNPLSGEGGGLAPGDLDAEARHLADEAKNLVSVTFDISKMNP

SEQ ID NO: 1201 - DNA, 3869 bp, Homo sapien
gagccggtggcgcaggtgtcggggtcctcgagcgcccagcctgggagcatgattgtggacaagctgctggacgacagccgcggcggagaggggctgcgggacgcggcgggcggctgcggcctcatgaccagcccgctcaacctgagctacttctacggcgcgtcgccgcccgccgccgccccgggcgcctgcgacgccagctgctcggtcttgggcccctcggcgcccggctcgcccggctccgactcctccgacttctcctctgcctcgtcggtgtcctcctgcggcgccgtggagtcccggtcgagaggcggcgcccgcgccgagcgccagccagttgagccccatatgggggttggcaggcagcagagaggcccctttcaaggtgttcgggtaaagaactcagtgaaggaactcctgttgcacatccgaagtcataaacagaaggcttctggccaagctgtggatgattttaagacacaaggtgtgaacatagaacagttcagagaattgaagaacacagtatcatacagtgggaaaaggaaagggcccgattcgttgtctgatggacctgcttgcaaaaggccagctctgttgcattcccaatttttgacaccacctcaaacaccaacgcccggggagagcatggaagatgttcatctcaatgaacccaaacaggagagcagtgctgatctgcttcagaacattatcaacattaagaatgaatgcagccccgtttccctgaacacagttcaagttagctggctgaaccccgtggtggtccctcagagctcccccgcagagcagtgtcaggacttccatggagggcaggtcttttctccacctcagaaatgccaaccattccaagtcaggggctcccaacaaatgatagaccaggcttccctgtaccagtattctccacagaaccagcatgtagagcagcagccacactacacccacaaaccaactctggaatacagtccttttcccatacctccccagtcccccgcttatgaaccaaacctctttgatggtccagaatcacagttttgcccaaaccaaagcttagtttcccttcttggtgatcaaagggaatctgagaatattgctaatcccatgcagacttcctccagtgttcagcagcaaaatgatgctcacttgcacagcttcagcatgatgcccagcagcgcctgtgaggccatggtggggcacgagatggcctctgactcttcaaacacttcactgccattctcaaacatgggaaatccaatgaacaccacacagttagggaaatcactttttcagtggcaggtggagcaggaagaaagcaaattggcaaatatttcccaagaccagtttctttcaaaggatgcagatggtgacacgttccttcatattgctgttgcccaagggagaagggcactttcctatgttcttgcaagaaagatgaatgcacttcacatgctggatattaaagagcacaatggacagagtgcctttcaggtggcagtggctgccaatcagcatctcattgtgcaggatctggtgaacatcggggcacaggtgaacaccacagactgctggggaagaacacctctgcatgtgtgtgctgagaagggccactcccaggtgcttcaggcgattcagaagggagcagtgggaagtaatcagtttgtggatcttgaggcaactaactatgatggcctgactccccttcactgtgcagtcatagcccacaatgctgtggtccatgaactccagagaaatcaacagcctcattcacctgaagttcaggagcttttactgaagaataagagtctggttgataccattaagtgcctaattcaaatgggagcagcggtggaagcgaaggatcgcaaaagtggccgcacagccctgcatttggcagctgaagaagcaaatctggaactcattcgcctctttttggagctgcccagttgcctgtcttttgtgaatgcaaaggcttacaatggcaacactgccctccatgttgctgccagcttgcagtatcggttgacacaattagatgctgtccgcctgttgatgaggaagggagcagacccaagtactcggaacttggagaacgaacagccagtgcatttggttcccgatggccctgtgggagaacagatccgacgtatcctgaagggaaagtccattcagcagagagctccaccgtattagctccattagcttggagcctggctagcaacactcactgtcagttaggcagtcctgatgtatctgtacatagaccatttgccttatattggcaaatgtaagttgtttctatgaaacaaacatatttagttcactattatatagtgggttatattaaaagaaaagaagaaaaatatctaatttctcttggcagatttgcatatttcatacccaggtatctgggatctagacatctgaatttgatctcaatggtaacattgccttcaattaacagtagcttttgagtaggaaaggactttgatttgtggcacaaaacattattaatatagctattgacagtttcaaagcaggtaaattgtaaatgtttctttaagaaaaagcatgtgaaaggaaaaaggtaaatacagcattgaggcttcatttggccttagtccctgggagttactggcgttggacaggcttcagtcattggactagatgaaaggtgtccatggttagaatttgatctttgcaaactgtatataattgttatttttgtccttaaaaatattgtacatacttggttgttaacatggtcatatttgaaatgtataagtccataaaatagaaaagaacaagtgaattgttgctatttaaaaaaattttacaattcttactaaggagtttttattgtgtaatcactaagtctttgtagataaagcagatggggagttacggagttgttcctttactggctgaaagatatattcgaattgtaaagatgctttttctcatgcattgaaattatacattatttgtagggaattgcatgcttttttttttttttctcccgagacagggtcttgctctggcgcccaggctggagtacagtggcatgatcttggctcacttcagccttgacttgggctcaagtgatcctcctacctgagccttctgagtaactgggactacaggtgtgcactcctcgcctggctaattttttattttttgtacaggcaggatcttgccaccttgcccaggctggtcttgaactcctgagctcatgccatctgcctgccttagtctcccaaaatgctgggattacaggagtgagccaccatgcccggctggcagttgcatggaagagaacacctctttatggcttaccctctagaatttctaatttatgtgttctgttgaaatttttgtttttttacctttattgaaacaacaaaaagtcagtattgaaacatatcttcctgttttctgttgtcaaatgatgataatgtgccatgatgttttatatatatcattcagaaaaagttttattttttaataacattctattaacattattttgcttgccgctggcatgcctgaggaatgtatttggctttgattacacactaagtttttgtaataaatttgactcattaaaaaccttttttttttaaaaaaaaaaaaaagaaaatctcattagtgaacttatctttgcagctgagtacttaaattctttttaaaaagataccctttggattgatcacattgtttgacccagtatgtcttgtagacacgttagttataatcaccttgtatctctaaatatggtgtgatatgaaccagtccattcacattggaaaaactgatggttttaaataaactaattcactaataaaaaaaaaaaaaaa

SEQ ID NO: 1202 - protein, 718 aa, Homo sapien
MIVDKLLDDSRGGEGLRDAAGGCGLMTSPLNLSYFYGASPPAAAPGACDASCSVLGPSAPGSPGSDSSDFSSASSVSSCGAVESRSRGGARAERQPVEPHMGVGRQQRGPFQGVRVKNSVKELLLHIRSHKQKASGQAVDDFKTQGVNIEQFRELKNTVSYSGKRKGPDSLSDGPACKRPALLHSQFLTPPQTPTPGESMEDVHLNEPKQESSADLLQNIINIKNECSPVSLNTVQVSWLNPVVVPQSSPAEQCQDFHGGQVFSPPQKCQPFQVRGSQQMIDQASLYQYSPQNQHVEQQPHYTHKPTLEYSPFPIPPQSPAYEPNLFDGPESQFCPNQSLVSLLGDQRESENIANPMQTSSSVQQQNDAHLHSFSMMPSSACEAMVGHEMASDSSNTSLPFSNMGNPMNTTQLGKSLFQWQVEQEESKLANISQDQFLSKDADGDTFLHIAVAQGRRALSYVLARKMNALHMLDIKEHNGQSAFQVAVAANQHLIVQDLVNIGAQVNTTDCWGRTPLHVCAEKGHSQVLQAIQKGAVGSNQFVDLEATNYDGLTPLHCAVIAHNAVVHELQRNQQPHSPEVQELLLKNKSLVDTIKCLIQMGAAVEAKDRKSGRTALHLAAEEANLELIRLFLELPSCLSFVNAKAYNGNTALHVAASLQYRLTQLDAVRLLMRKGADPSTRNLENEQPVHLVPDGPVGEQIRRILKGKSIQQRAPPY

SEQ ID NO: 1203 - DNA, 3869 bp, Homo sapien; identical to SEQ ID NO: 1201

SEQ ID NO: 1204 - protein, 718 aa, Homo sapien; identical to SEQ ID NO: 1202

SEQ ID NO: 1205 - DNA, 2411 bp, Homo sapien
ggccgcgcgtcccagagagccagccccggccgccgtcgcggggaagtgccgcctggtggggtcacggcgcctgaagcccacgtgcgccgccgagcccgaggtggcctcgagcgcggcggctgacagcacagcccgcctgagctgcctcccgcgctcctccccgaggaaaggattttgatttcaaagaaaggaaggaaggaaggacaactcccagcttccccgtcccgccctccccgctccgagggccgcgccaggccatgcccaagaaggcggcggcggcggcgaaccagcagaagggactttcctggcagcccggcgacgaggagcgcggacagtgagtttgctctgccccggttcatggttcctgcaagccctctaggaggccgaaagctgcagcccctccccttgccccgaagagccttccgcgttctctcgccctcgggcccaccccgcgccgcccgggctcccgccgccgcagcccagtgccctctgcccgcggcggtggatggcatgatggtgcggggaaggcaccgcggccttggccagctgagtcgcgacggccgccggggcggcggcagtggccgcggcagcggcggtggtagcgggctccccagcggcatgccagtgccccccgggcgcgatggctagcggcagcgccgggaagcccactggcgaggcggcttctccggctcctgcgagcgccatcggcggggccagctcgcagccgcggaagaggctggtatccgtctgcgaccactgcaagggcaagatgcagctggtggctgacctgctgctgctgtcgagcgaggcgcggcccgtgctcttcgagggccccgcctcctctggtgccggcgccgagtccttcgagcagtgccgggacaccatcatcgcgcgcaccaaggggctctccatcctcacccacgacgtgcagagccagctcaacatgggccgcttcggggaggcgggggacagcctggtggagctgggcgacctggtggtgtcgctgaccgagtgctcggcccacgcggcctatctggccgctgtggccacgccgggcgcccagcccgcgcagccgggcctggtggaccgctaccgcgtgacgcgatgccgccacgaggtggagcagggttgcgccgtgctgcgcgccacgccgctggccgacatgacgccgcagctgctgctggaggtgtcgcagggcctgtcgcgcaacctcaagttcctgacggacgcgtgcgccctggccagtgacaagtcacgggaccgcttttcgcgggagcagttcaagctgggcgtcaagtgcatgagcaccagcgcgtcggcgctgctggcctgcgtgcgcgaggtgaaggtggcgcccagtgagctggcgcgcagccgctgtgcgctcttcagcgggcccctggtgcaggcagtgagcgccctggtaggcttcgccaccgagccgcagttcctgggtcgcgcggcagctgtgagcgccgagggcaaggcggtgcagaccgccatcctgggcggcgccatgagcgtggtgtcggcctgcgtgctcctgacccagtgcctcagggatctggcgcagcaccccgacgggggcgccaagatgtcggaccacagggagaggctgaggaactcggcctgcgccgtgtctgaaggctgcaccctgctatctcaggctttaagggagaggtcttcgcccaggactttaccgccagtgaattccaattctgtgaattagcaccccacccccataccccttcttccacccccagactaaaggaagatacttactctctgcccctctccatttataccaaagaaatcataggtgaaaccccctaccctccccaacgttaaatgctcgagaggaatcttccacaaggcagggccatgcacgcaacctgcacacgcacttggagggcccaggtgtctctccaccagcccccatgcagtagggactggaagatatgtcatctgctggttgtgttatcactcccaccccctaccccagcccgtcttccggaatttctcaactaaatttcattattgggcaggaaggaggtcatgggttcatttcatttttgttttttgtgtttttaattaaaagaaaggttacctcagttttcactccttagacatggatgtagctacctttttttgtatgtctttttttttttaagcaatcgtgttgaattaggagtatacttggtgaggaaagagtatgaatttgccatgtgatttgcaaatggggggaagctactgtgagcgtgtgtttttttaatttacactatagagtgattttttttcccccaacgtcaagtttttaccttgcatgtactggagtatttatttcatctattaaaatgttatgtttctcagaaaaaaacctcgtggcgaattcttggcctcgagggccaaat

SEQ ID NO: 1206 - protein, 362 aa, Homo sapien
MASGSAGKPTGEAASPAPASAIGGASSQPRKRLVSVCDHCKGKMQLVADLLLLSSEARPVLFEGPASSGAGAESFEQCRDTIIARTKGLSILTHDVQSQLNMGRFGEAGDSLVELGDLVVSLTECSAHAAYLAAVATPGAQPAQPGLVDRYRVTRCRHEVEQGCAVLRATPLADMTPQLLLEVSQGLSRNLKFLTDACALASDKSRDRFSREQFKLGVKCMSTSASALLACVREVKVAPSELARSRCALFSGPLVQAVSALVGFATEPQFLGRAAAVSAEGKAVQTAILGGAMSVVSACVLLTQCLRDLAQHPDGGAKMSDHRERLRNSACAVSEGCTLLSQALRERSSPRTLPPVNSNSVN

SEQ ID NO: 1207 - DNA, 2308 bp, Homo sapien
ggcacgagggctgcttgcactctgaatttgggctattcaggtagtgtgctcaaagttgaaaccgcatacagcacaactcaagtttgcatcagactgggaagcgaacttaagccagcggtgcgtggcccaggagtgggaaaggaaatggatgcctgaagtggaagaggtggtgcagagggggcaccgcccatgctgccctgcttccaactgctgcgcatagggggcggcaggggcggtgatctctacaccttccacccccccgccggggctggctgcacctatcgcttgggccacagggccgacctgtgtgatgtggccctgcggccccagcaggagcctggcctcatctctgggatccacgccgaactgcatgccgagccccggggtgatgactggagggtcagcctggaagaccacagcagccaaggtactttggtcaataatgtccgactcccaagaggtcacaggctggaattgagtgatggagacctcctgacctttggccctgaagggcccccaggaaccagcccctcggagttctacttcatgttccaacaagtacgagtcaagcctcaggactttgctgccattaccatcccacggtctaggggagaagcccgggttggggctggtttccggcctatgctgccctcccagggggctccacagcggcctctcagcaccttctcccctgcccccaaggccacactgatcctaaactccataggcagcctcagcaagctccggccccagcccctcaccttctcccctagttggggtggaccaaagagcctgcctgttcccgccccacctggggaagtggggaccacgccttctgctccaccccaacgcaatcggaggaaatctgttcaccgagtgttggcggaactggatgatgagagtgagcctcttgagaacccgccaccggtccttatggagcccaggaagaaactccgtgtagacaaagccccactgactcccactggaaatcgacgtggccgtcctcggaagtacccagtgagcgctcccatggctccccctgcagttgggggcggggagccctgtgcagctccttgttgctgcctgccccaggaagagacagtggcctgggttcagtgtgatggctgtgacgtctggttccatgtggcctgtgttggctgcagcatccaggctgccagggaggccgacttccgatgcccagggtgccgggctggcattcagacctaaggtccaccgccaaggcaccatcggacacacctgcccatgagtagacacagcagcgagcaaataggtctgataaataccccccttcccttccctccccaggagggaatgactacagggaagaaggatggattgatgtggactcattcagggcctggagcagaccctggtggccaagacagaagagatggtttcctgccaaagatattgccacctccaggaaattgccagtgagctggaagttcccactattacaagccataaggccatgttgccatggacaccagaatatctgtagtcagagcacctatcagttgcaaaagccatgcctgcaaccgatggaaaatgtaagagggagttcttaaggttcttgatggcatcacccaaggcattctgggaaaacctagggcctggccccaaaacttccctactctgtggctagtcctgctgccaacaaaatcgtagcgacctggcttttcacagctttgcttttatttccaagtcaaggacaagccgcttcattcactcctgggcatttactcttcttgtgggtctgtgatattccttgctttccagggagaatgtgcttggcaaggtctggagaactaattcagaatcttaggggaaggggagagatggaaatacaaacctgcttactggaaaggtgcaaatatatgggttgagctggaggtaggaatacaggtaattaaggtttctggtttaagggaaaacagatctattgccatttaaataaggtaactgggatttggttaagttcacaaagttagcagaagatttatttacaggcttcacctgtactgtcagggcaagagaaagcctggtaaaccagctacagcagtttaccagtgtgatggctgtgacacagctccactccacgggtggacacagcagagggcaactgggctggcctggttcagtgtgaatcaaaccgcttaacccacacatggtacatgtgattttcttttgtgagccttacaccaagccaaactattgtcaaagcatcatttctatagaaataaagccttatcttgacctgttctattaaaaaaaaaaaaaaaaaaaa

SEQ ID NO: 1208 - protein, 345 aa, Homo sapien [sequence omitted]

SEQ ID NO: 1209 - DNA, 794 bp, Homo sapien
ggcagccgtctgtgccacccagagccggcgggccgctaggtccccggagaccctgctatggtgcgtgcgggcgccgtgggggctcatctccccgcgtccggcttggatatcttcggggacctgaagaagatgaacaagcgccagctctattaccaggttttaaacttcgccatgatcgtgtcttctgcactcatgatatggaaaggcttgatcgtgctcacaggcagtgagagccccatcgtggtggtgctgagtggcagtatggagccggcctttcacagaggagacctcctgttcctcacaaatttccgggaagacccaatcagagctggtgaaatagttgtttttaaagttgaaggacgagacattccaatagttcacagagtaatcaaagttcatgaaaaagataatggagacatcaaatttctgactaaaggagataataatgaagttgatgatagaggcttgtacaaagaaggccagaactggctggaaaagaaggacgtggtgggaagagcaagagggtttttaccatatgttggtatggtcaccataataatgaatgactatccaaaattcaagtatgctcttttggctgtaatgggtgcatatgtgttactaaaacgtgaatcctaaaatgagaagcagttcctgggaccagattgaaatgaattctgttgaaaaagagaaaaactaatatatttgagatgttccattttctgtataaaagggaacagtgtggagatgtttttgtcttgtccaaataaaagattcaccagtaaaaaaaaaaaaaa

SEQ ID NO: 1210 - protein, 192 aa, Homo sapien
MVRAGAVGAHLPASGLDIFGDLKKMNKRQLYYQVLNFAMIVSSALMIWKGLIVLTGSESPIVVVLSGSMEPAFHRGDLLFLTNFREDPIRAGEIVVFKVEGRDIPIVHRVIKVHEKDNGDIKFLTKGDNNEVDDRGLYKEGQNWLEKKDVVGRARGFLPYVGMVTIIMNDYPKFKYALLAVMGAYVLLKRES

SEQ ID NO: 1211 - DNA, 2168 bp, Homo sapien
tccctgtcctgcgcccgcgcgccccgggagcctacccagcacgcgctccgcgcccactggttccctccagccgccgccgtccagccgagtccccactccggagtcgccgctgccgcggggacatggtcctctgcgttcaggggtgagcacccccttgtaagctcagggctactgttgggtgtcagggaacaaagttttagactgctgcgctccaaagcgggcacacacatgtacctagaacacaccagccactgtccccaccatgatgatgacacagccatggacacacccctgcccagacctcgtcctttgctggctgtggagcggactgggcagcggcccctgtgggccccgtccctggaactgcccaagccagtcatgcagcccttgcctgctggggccttcctcgaggaggtggcagagggtaccccagcccagacagagagtgagccaaaggtgctggacccagaggaggatctgctgtgcatagccaagaccttctcctaccttcgggaatctggctggtattggggttccattacggccagcgaggcccgacaacacctgcagaagatgccagaaggcacgttcttagtacgtgacagcacgcaccccagctacctgttcacgctgtcagtgaaaaccactcgtggccccaccaatgtacgcattgagtatgccgactccagcttccgtctggactccaactgcttgtccaggccacgcatcctggcctttccggatgtggtcagccttgtgcagcactatgtggcctcctgcactgctgatacccgaagcgacagccccgatcctgctcccaccccggccctgcctatgcctaaggaggatgcgcctagtgacccagcactgcctgctcctccaccagccactgctgtacacctaaaactggtgcagccctttgtacgcagaagcagtgcccgcagcctgcaacacctgtgccgccttgtcatcaaccgtctggtggccgacgtggactgcctgccactgccccggcgcatggccgactacctccgacagtaccccttccagctctgactgtacggggcaatctgcccaccctcacccagtcgcaccctggaggggacatcagccccagctggacttgggcccccactgtccctcctccaggcatcctggtgcctgcatacctctggcagctggcccaggaagagccagcaagagcaaggcatgggagaggggaggtgtcacacaacttggaggtaaaatgcccccaggccgcatgtggcttcattatactgagccatgtgtcagaggatggggagacaggcaggaccttgtctcacctgtgggctgggcccaaacctccactcgcttgcctgccctggccacctgaactgtatgggcactctcagccctggtttttcaatccccagggtcggtaggacccctactggcagccagcctctgtttctgggaggatgacatgcagaggaactgagatcgacagtgactagtgaccccttgttgaggggtaagccaggctaggggactgcacaattatacactatttatttatttattctccttggggttggtgtcaggggcaaaccaaccccacctctatgccctgagccctggtagtccaaagaccccaactctgccctggcttctctggttcttccctgtggaaagcccatcctgagacatcttgctggaaccaaggcaatcctggatgtcctggtactgacccacccctctgtgaatgtgtccactctcttctgcccccagccatatttggggaggatggacaactacaataggtaagaaaatgcagccggagcctcagtccccagcagagcctgtgtctcaccccctcacaggacagagctgtatctgcataaagctggtctcactgtggcgcaggccccggggggagtgcctgtgctgtcaggaaaagggggtgctggtttgagggccaccactgcagttctgctaggtctgcttcctgcccaggaaggtgcctgcacatgaaaggagagaaatacacgtctgataagacttcatgaaataataattatagcaaagaacagtttggtggtcttttctcttccactgatttttctgtaatgaacattatacctttattacctctttattttattacctctataataaaatgatacctt

SEQ ID NO: 1212 - protein, 258 aa, Homo sapien
MDTPLPRPRPLLAVERTGQRPLWAPSLELPKPVMQPLPAGAFLEEVAEGTPAQTESEPKVLDPEEDLLCIAKTFSYLRESGWYWGSITASEARQHLQKMPEGTFLVRDSTHPSYLFTLSVKTTRGPTNVRIEYADSSFRLDSNCLSRPRILAFPDVVSLVQHYVASCTADTRSDSPDPAPTPALPMPKEDAPSDPALPAPPPATAVHLKLVQPFVRRSSARSLQHLCRLVINRLVADVDCLPLPRRMADYLRQYPFQL

SEQ ID NO: 1213 - DNA, 3873 bp, Homo sapien
atctgctggcatttcctgcagccaggcccgcgccgccagtggagcccccgcgcgcccggccggcccggagcaccgagctcgcggcacggtaggagaagcccccgagcgcccacagcatgaaggaggaggccttcctccggcgccgcttctccctgtgtccaccttcctccacccctcagaaagtcgacccccggaagctcacccggaacttgctcctcagcggagacaatgagctctacccactcagcccagggaaggacatggagcccaacggcccgtcgctgcccagggatgaagggcccccgaccccaagctctgccacgaaggtgccaccggcagagtacaggctgtgcaacgggtcagacaaggaatgtgtgtcccccaccgccagggtcaccaagaaggagactctcaaggcgcagaaggagaactaccggcaggagaagaagcgcgccacacggcagctgctcagcgctctgacagaccccagcgtggtcatcatggctgacagcctgaagatccgcggcaccctgaagagctggaccaagctgtggtgcgtgctgaagccgggggtgctgctcatctacaagacgcccaaggtgggccagtgggtgggcacggtgctgctgcactgctgcgagctcatcgagcggccctccaagaaggacggcttctgcttcaagctcttccacccgctggatcagtccgtctgggccgtgaagggccccaaaggtgagagcgtgggctccatcacacagcccctgcccagcagctacctgatcttcagggccgcctccgagtcagatggtcgctgctggctggacgccctggagctggccctgcgctgctctagcctactgagactgggcacctgcaagccgggccgagacggggagccagggacctcgccagacgcatcaccctcatcgctctgtgggctgccagcctcagccaccgtccacccagaccaagacctgttcccactgaacgggtcttccctggagaacgatgcattctcagacaagtcggagagagagaaccctgaggagtcagataccgagacccaggaccatagccggaagacggagagtggcagcgaccagtcagagacccctggggccccggtgcggagagggaccacctatgtggagcaggtccaggaggagctgggggagctgggcgaggcgtcccaggtggagacagtgtcagaggagaacaagagtctgatgtggaccctgctgaagcagctacggccaggcatggacctgtcccgcgtggtgctacccacgttcgtactggagccgcgctccttcctgaacaagctctccgactactactaccacgcagacctgctctccagggctgcggtggaggaggatgcctacagccgcatgaagctggtgctgcggtggtacctgtctggcttctacaagaagcccaagggaatcaagaagccgtacaaccccatcctgggggagaccttccgctgctgctggttccacccgcagactgacagccgcacattctacatagcagagcaggtgtcccaccacccgcccgtgtctgccttccacgtcagcaaccggaaggacggcttctgcatcagtggcagcatcacagccaagtccaggttttatgggaactcgctgtcggcgctgctggacggcaaagccacgctcaccttcctgaaccgagccgaggattacacccttaccatgccctacgcccactgcaaaggaatcctgtatggcacgatgaccctggagctgggtgggaaggtcaccatcgagtgtgcgaagaacaacttccaggcccagctggaattcaaactcaagcccttcttcgggggtagcaccagcatcaaccagatctcgggaaagatcacgtcgggagaggaagtcctggcgagcctcagtggccactgggacagggacgtgtttatcaaggaggaagggagcggaagcagtgcgcttttctggaccccgagcggggaggtccgcagacagaggctgaggcagcacacggtgccgctggaggagcagacggagctggagtccgagaggctctggcagcacgtcaccagggccatcagcaagggcgaccagcacagggccacacaggagaagtttgcactggaggaggcacagcggcagcgggcccgtgagcggcaggagagcctcatgccctggaagccgcagctgttccacctggaccccatcacccaggagtggcactaccgatacgaggaccacagcccctgggaccccctgaaggacatcgcccagtttgagcaagacgggatcctgcggaccttgcagcaggaggccgtggcccgccagaccaccttcctgggcagcccagggcccaggcacgagaggtctggcccagaccagcggcttcgcaaggccagcgaccagccctccggccacagccaggccacggagagcagcggatccacgcctgagtcctgcccagagctctcagacgaggagcaggatggtgactttgtccctggcggtgagagcccatgccctcggtgcaggaaggaggcgcggcggctgcaggccctgcacgaggccatcctctccatccgagaggcccagcaggagctgcacaggcacctctcggccatgctgagctccacggcacgggcagcacaggcaccgaccccaggcctcctgcagagcccccgatcctggttcctgctctgcgtgttcctggcgtgtcagctgttcattaaccacatcctcaaataggagccctgggggcagagctcctggccagtcccgagccctccctcccaggcacccagcactttaagcctgctccatggaggcagagaggcccggcaagcacagccactgtgacggggagtccaggcgcaggagggacccggggccacaaggcgctgcgggcccaggtgtgctgggcccctctcaggggcactggcctctctgcagggccttccgcccagcgctggccttaatgctaaagccaaatgcagcttctgctgtgcgacgcactcctggccatcttgccgtgtcaccccctgtccggcctccacttgccatgggggatggatggatttagggtgggagggcctgtgggggccctggacagtcacaccccagcagcagtgagtgggcaggtttggaggagcagccagggagccccgagtggcccaggagtccccccacacacagatgcataggcctgccttccggagaccctgtccacattgccgggaccaccctggtggggccactggtgggtgccagggacaggttagggccactctggggaaggcattttggttttttattccacgctgtgctgtttggatgggagccccacagaggcaggtcctggaaccaccccacccccacacctggacgctcgctctggtgggggcacacgcaggtggaggtggttgtgggtgcaggtgtgtgcaggggtgtggggggcgcaggggtgtggcttagctggccccgcacccaggccggggaggctcaagttcgccactttactcagaccgatgcacagtcttcccattttacacttttttaataaacataattgcaatattttaggtgggctgcgagctgcagtcagccttcacgtctggcctcagtccccgtgtcagtgccgctctgcgtgtgcgtgtgcgcgtgtgtgagcctctacacatatatatacgtacagagccttaaaccacatcgtggcggtgccgtctgagctgtagcgggtggctttgtttccagtttttgtacccgtgtccttgtctcccctcctcccccatctggggatgtgtctgtgttccacaccttgaaataaacagacacatacgtgttctcttaaaaaaaaaaaaaaaaa

SEQ ID NO: 1214 - protein, 879 aa, Homo sapien
MKEEAFLRRRFSLCPPSSTPQKVDPRKLTRNLLLSGDNELYPLSPGKDMEPNGPSLPRDEGPPTPSSATKVPPAEYRLCNGSDKECVSPTARVTKKETLKAQKENYRQEKKRATRQLLSALTDPSVVIMADSLKIRGTLKSWTKLWCVLKPGVLLIYKTPKVGQWVGTVLLHCCELIERPSKKDGFCFKLFHPLDQSVWAVKGPKGESVGSITQPLPSSYLIFRAASESDGRCWLDALELALRCSSLLRLGTCKPGRDGEPGTSPDASPSSLCGLPASATVHPDQDLFPLNGSSLENDAFSDKSERENPEESDTETQDHSRKTESGSDQSETPGAPVRRGTTYVEQVQEELGELGEASQVETVSEENKSLMWTLLKQLRPGMDLSRVVLPTFVLEPRSFLNKLSDYYYHADLLSRAAVEEDAYSRMKLVLRWYLSGFYKKPKGIKKPYNPILGETFRCCWFHPQTDSRTFYIAEQVSHHPPVSAFHVSNRKDGFCISGSITAKSRFYGNSLSALLDGKATLTFLNRAEDYTLTMPYAHCKGILYGTMTLELGGKVTIECAKNNFQAQLEFKLKPFFGGSTSINQISGKITSGEEVLASLSGHWDRDVFIKEEGSGSSALFWTPSGEVRRQRLRQHTVPLEEQTELESERLWQHVTRAISKGDQHRATQEKFALEEAQRQRARERQESLMPWKPQLFHLDPITQEWHYRYEDHSPWDPLKDIAQFEQDGILRTLQQEAVARQTTFLGSPGPRHERSGPDQRLRKASDQPSGHSQATESSGSTPESCPELSDEEQDGDFVPGGESPCPRCRKEARRLQALHEAILSIREAQQELHRHLSAMLSSTARAAQAPTPGLLQSPRSWFLLCVFLACQLFINHILK

SEQ ID NO: 1215 - DNA, 1027 bp, Homo sapien
gaatctctcgcgggcagcagggcgcgcgctgcacgcacagtactaggtcaggtggtgctcccgggtgaggagctgctcctgccggaacaggaggacgcggaaggccctgggggtgcagtggagcgaccgttgagcctgaatgctagagcgtgctcgcgggtgcgcgtttgtatgcggtccgggccttcgacgctgtggggaccgcctgctggtcaccaagtgcggccgcctccgtcacaaggagcccggcagtggaggcggcggcggtgtttactgggtggactctcagcagaagcggtatgttccagtaaaaggagaccatgtgattggcatagtgacagctaaatctggagatatattcaaagttgatgttggagggagtgagccagcttctttgtcttacttgtcatttgaaggtgcaactaaaagaaacagaccaaatgtgcaggttggagatctcatctatggccagtttgtggttgctaataaagacatggaaccagagatggtctgtattgacagctgtggacgagccaatggaatgggtgtcattggacaggatggtctgctttttaaagtgactctgggcttaattagaaagctattagctccagattgtgaaatcatacaggaagtgggaaaactctatccactggagatagtatttggaatgaatggaagaatatgggttaaggcaaaaaccatccagcagactttaattttggcaaacattttagaagcttgtgaacacatgacgtcagatcaaagaaaacagatcttctccagattggcagaaagttgatataggtggacttttttacaggtcagttgaggcaaaaaactatgggttttttcaggtgaacctcccccatttaaatactcagaagataaggtgtgaatgtatgtattattagagtccgaaagtatttttataagttactggttttcacccacgcttttgtgggagagaaaatcattgcaaaatcattttttttgttcggtacaataaagtttactaaaaaacaaa

SEQ ID NO: 1216 - protein, 220 aa, Homo sapien
MLERARGCAFVCGPGLRRCGDRLLVTKCGRLRHKEPGSGGGGGVYWVDSQQKRYVPVKGDHVIGIVTAKSGDIFKVDVGGSEPASLSYLSFEGATKRNRPNVQVGDLIYGQFVVANKDMEPEMVCIDSCGRANGMGVIGQDGLLFKVTLGLIRKLLAPDCEIIQEVGKLYPLEIVFGMNGRIWVKAKTIQQTLILANILEACEHMTSDQRKQIFSRLAES

SEQ ID NO: 1217 - DNA, 1645 bp, Homo sapien
ggattttccttggtcttaagatgggtagaaatgtgatgcgacacatgtctgatgacttaggaagttatgtttctctttcgtgtgatgacttttcttcacaggaattagagattttcatttgctccttttcctcctcctggcttcaaatgtttgttgcagaggcagtctttaaaaagttgtgtctacagagctctggcagtgtttcttctgagccactctctcttcagaaaatggtatattcctatttaccagccttggggaaaactggtgtgcttgggtctggaaagattcaggtgtcaaagaaaataggacagcggccttgttttgactctcagagaaccttactaatgctgaatggtactaaacaaaaacaagtcgaagggctgccagagttactagacctgaaccttgctaaatgttcctcatcattaaaaaaattgaaaaagaagtcagaaggagaattgtcatgttccaaggagaattgcccctctgtagttaaaaagatgaattttcacaagactaatctaaaaggagaaacagccctgcatagagcttgcataaataaccaagtggagaaattgattcttcttctctctttgccaggaatagacatcaatgttaaagacaatgctggctggacgcctttgcatgaagcctgtaactatggcaacacagtgtgtgtccaggaaattttgcaacgttgtccagaggtagatctgctcactcaagtggacggggtgactcctttgcatgatgcactgtcaaacggacatgtagaaattggcaagctgctactacagcatgggggcccagtgcttttacaacagaggaatgctaagggagaattgcccttggattatgtggtttcacctcaaatcaaagaagaactgtttgctattacaaaaatagaagatacagtggagaactttcatgcacaagcagagaaacattttcattaccagcaacttgaatttggctcctttttacttagtaggatgttgctaaatttttgttcaatttttgatttatcttcagagttcattttagcttccaaagggttaactcatctaaatgaactgcttatggcttgtaaaagtcataaagaaaccaccagtgttcatactgactggttactggatctttatgctggaaatataaagacattgcagaaactcccacacattcttaaggaactgcctgagaatttgaaagtgtgtcctggggtacacactgaggccttgatgataacattggaaatgatgtgtcggtcagtcatggagttttcatgatgatgctagaaagtatggattgactttctaaatctgttcagtttgcattggtacttactgtggacttcatagcttactgacagatagtaatttgatttatttattgacagactttgcagccttgctaaattttaaaagcatttttaaaaaaacttctacaaaactctagtatgggcttctgactttttccagggtgtagaatttgactcaaaagtaaaaataattttgttttagtatattctactttcattaatgtttttttgttctgaaagtgatattatattgtacatgtaaaattaatttaaatattttttcaaataaaaatgtaatgtcctgtaaaaaaaaaaaaaaaaaaa

SEQ ID NO: 1218 - protein, 422 aa, Homo sapien
MGRNVMRHMSDDLGSYVSLSCDDFSSQELEIFICSFSSSWLQMFVAEAVFKKLCLQSSGSVSSEPLSLQKMVYSYLPALGKTGVLGSGKIQVSKKIGQRPCFDSQRTLLMLNGTKQKQVEGLPELLDLNLAKCSSSLKKLKKKSEGELSCSKENCPSVVKKMNFHKTNLKGETALHRACINNQVEKLILLLSLPGIDINVKDNAGWTPLHEACNYGNTVCVQEILQRCPEVDLLTQVDGVTPLHDALSNGHVEIGKLLLQHGGPVLLQQRNAKGELPLDYVVSPQIKEELFAITKIEDTVENFHAQAEKHFHYQQLEFGSFLLSRMLLNFCSIFDLSSEFILASKGLTHLNELLMACKSHKETTSVHTDWLLDLYAGNIKTLQKLPHILKELPENLKVCPGVHTEALMITLEMMCRSVMEFS

SEQ ID NO: 1219 - DNA, 3165 bp, Homo sapien; identical to SEQ ID NO: 1083

SEQ ID NO: 1220 - protein, 838 aa, Homo sapien; identical to SEQ ID NO: 1084

SEQ ID NO: 1221 - DNA, 570 bp, Homo sapien
ggccgtgccttctctcgcttcggactgcgcaacgctgcgctctgggctgacaggcggataaaacggtcccatcaagactgagaaaaagcacaccagctattggcacagcgtgggcagtggggcctacaggatgactgacttagtctacagagatcccggcgtacttaagcagatgaagactcttaagatgacagaaggtgatttttctggtgatcgaggacttccggggtaatgacagtgatgaaatgcaggggacctggttgcccccaagtttcctggcagtgtgtgatactgaggaggtgagcttgtttctggagctgtgctttaagattcatgttacatgtaaagctgtcctcatttgtgactatggacctatggagttgggacaatctctatgggaagcagaaggcaaggaccccggtcattttaggtagaaacaacagcatgctaatgcaaaaaattatgcagtgtgctactgaacttcagaggtgatcaataaaagaagaataaaaagactaataaaaaaaaaaaaaaaaaaaaaaaaaaaaaaaaaaaaaaaaaaaaaaaaaa

SEQ ID NO: 1222 - protein, 62 aa, Homo sapien
MQGTWLPPSFLAVCDTEEVSLFLELCFKIHVTCKAVLICDYGPMELGQSLWEAEGKDPGHFR

SEQ ID NO: 1223 - DNA, 1138 bp, Homo sapien
ccctttaaagggtgactcgtcccacttgtgttctctctcctggtgcagagttgcaagcaagtttatcagagtatcgccatgaagttcgtcccctgcctcctgctggtgaccttgtcctgcctggggactttgggtcaggccccgaggcaaaagcaaggaagcactggggaggaattccatttccagactggagggagagattcctgcactatgcgtcccagcagcttggggcaaggtgctggagaagtctggcttcgcgtcgactgccgcaacacagaccagacctactggtgtgagtacagggggcagcccagcatgtgccaggcttttgctgctgaccccaaaccttactggaatcaagccctgcaggagctgaggcgccttcaccatgcgtgccagggggccccggtgcttaggccatccgtgtgcagggaggctggaccccaggcccatatgcagcaggtgacttccagcctcaagggcagcccagagcccaaccagcagcctgaggctgggacgccatctctgaggcccaaggccacagtgaaactcacagaagcaacacagctgggaaaggactcgatggaagagctgggaaaagccaaacccaccacccgacccacagccaaacctacccagcctggacccaggcccggagggaatgaggaagcaaagaagaaggcctgggaacattgttggaaacccttccaggccctgtgcgcctttctcatcagcttcttccgagggtgacaggtgaaagacccctacagatctgacctctccctgacagacaaccatctctttttatattatgccgctttcaatccaacgttctcacactggaagaagagagtttctaatcagatgcaacggcccaaattcttgatctgcagcttctctgaagtttggaaaagaaaccttcctttctggagtttgcagagttcagcaatatgatagggaacaggtgctgatgggcccaagagtgacaagcatacacaactacttattatctgtagaagttttgctttgttgatctgagccttctatgaaagtttaaatatgtaacgcattcatgaatttccagtgttcagtaaatagcagctatgtgtgtgcaaaataaaagaatgatttcagaaat

SEQ ID NO: 1224 - protein, 223 aa, Homo sapien
MKFVPCLLLVTLSCLGTLGQAPRQKQGSTGEEFHFQTGGRDSCTMRPSSLGQGAGEVWLRVDCRNTDQTYWCEYRGQPSMCQAFAADPKPYWNQALQELRRLHHACQGAPVLRPSVCREAGPQAHMQQVTSSLKGSPEPNQQPEAGTPSLRPKATVKLTEATQLGKDSMEELGKAKPTTRPTAKPTQPGPRPGGNEEAKKKAWEHCWKPFQALCAFLISFFRG

SEQ ID NO: 1225 - DNA, 1214 bp, Homo sapien
gtctacaccccctcctcacacgcacttcacctgggtcgggattctcaggtcatgaacggtcccagccacctccgggcagggcgggtgaggacggggacggggcgtgtccaactggctgtgggctcttgaaacccgagcatggcacagcacggggcgatgggcgcgtttcgggccctgtgcggcctggcgctgctgtgcgcgctcagcctgggtcagcgccccaccgggggtcccgggtgcggccctgggcgcctcctgcttgggacgggaacggacgcgcgctgctgccgggttcacacgacgcgctgctgccgcgattacccgggcgaggagtgctgttccgagtgggactgcatgtgtgtccagcctgaattccactgcggagacccttgctgcacgacctgccggcaccacccttgtcccccaggccagggggtacagtcccaggggaaattcagttttggcttccagtgtatcgactgtgcctcggggaccttctccgggggccacgaaggccactgcaaaccttggacagactgcacccagttcgggtttctcactgtgttccctgggaacaagacccacaacgctgtgtgcgtcccagggtccccgccggcagagccgcttgggtggctgaccgtcgtcctcctggccgtggccgcctgcgtcctcctcctgacctcggcccagcttggactgcacatctggcagctgaggagtcagtgcatgtggccccgagagacccagctgctgctggaggtgccgccgtcgaccgaagacgccagaagctgccagttccccgaggaagagcggggcgagcgatcggcagaggagaaggggcggctgggagacctgtgggtgtgagcctggccgtcctccggggccaccgaccgcagccagcccctccccaggagctccccaggccgcaggggctctgcgttctgctctgggccgggccctgctcccctggcagcagaagtgggtgcaggaaggtggcagtgaccagcgccctggaccatgcagttcggcggccgcggctgggccctgcaggagggagagagagacacagtcatggcccccttcctcccttgctggccctgatggggtggggtcttaggacgggaggctgtgtccgtgggtgtgcagtgcccagcacgggacccggctgcaggggaccttcaataaacacttgtccagtgaaaaaaaaaaaaaaa

SEQ ID NO: 1226 - protein, 241 aa, Homo sapien
MAQHGAMGAFRALCGLALLCALSLGQRPTGGPGCGPGRLLLGTGTDARCCRVHTTRCCRDYPGEECCSEWDCMCVQPEFHCGDPCCTTCRHHPCPPGQGVQSQGKFSFGFQCIDCASGTFSGGHEGHCKPWTDCTQFGFLTVFPGNKTHNAVCVPGSPPAEPLGWLTVVLLAVAACVLLLTSAQLGLHIWQLRSQCMWPRETQLLLEVPPSTEDARSCQFPEEERGERSAEEKGRLGDLWV

SEQ ID NO: 1227 - DNA, 1742 bp, Homo sapien
cgcccgcgcgccccgggagcctacccagcacgcgctccgcgcccactggttccctccagccgccgccgtccagccgagtccccactccggagtcgccgctgccgcggggacatggtcctctgcgttcagggacctcgtcctttgctggctgtggagcggactgggcagcggcccctgtgggccccgtccctggaactgcccaagccagtcatgcagcccttgcctgctggggccttcctcgaggaggtggcagagggtaccccagcccagacagagagtgagccaaaggtgctggacccagaggaggatctgctgtgcatagccaagaccttctcctaccttcgggaatctggctggtattggggttccattacggccagcgaggcccgacaacacctgcagaagatgccagaaggcacgttcttagtacgtgacagcacgcaccccagctacctgttcacgctgtcagtgaaaaccactcgtggccccaccaatgtacgcattgagtatgccgactccagcttccgtctggactccaactgcttgtccaggccacgcatcctggcctttccggatgtggtcagccttgtgcagcactatgtggcctcctgcactgctgatacccgaagcgacagccccgatcctgctcccaccccggccctgcctatgcctaaggaggatgcgcctagtgacccagcactgcctgctcctccaccagccactgctgtacacctaaaactggtgcagccctttgtacgcagaagcagtgcccgcagcctgcaacacctgtgccgccttgtcatcaaccgtctggtggccgacgtggactgcctgccactgccccggcgcatggccgactacctccgacagtaccccttccagctctgactgtacggggcaatctgcccaccctcacccagtcgcaccctggaggggacatcagccccagctggacttgggcccccactgtccctcctccaggcatcctggtgcctgcatacctctggcagctggcccaggaagagccagcaagagcaaggcatgggagaggggaggtgtcacacaacttggaggtaaatgcccccaggccgcatgtggcttcattatactgagccatgtgtcagaggatggggagacaggcaggaccttgtctcacctgtgggctgggcccagacctccactcgcttgcctgccctggccacctgaactgtatgggcactctcagccctggtttttcaatccccagggtcgggtaggacccctactggcagccagcctctgtttctgggaggatgacatgcagaggaactgagatcgacagtgactagtgaccccttgttgaggggtaagccaggctaggggactgcacaattatacactatttatttatttattctccttggggttggtgtcaggggcgagccaaccccacctctatgccctgagccctggtagtccagagaccccaactctgccctggcttctctggttcttccctgtggaaagcccatcctgagacatcttgctggaaccaaggcaatcctggatgtcctggtactgacccacccgtctgtgaatgtgtccactctcttctgcgcccagccatatttggggaggatggacaactacaataggtaagaaaatgcagccggagcctcagtccccagcagagcctgtgtctcaccccctcacaggacagagctgtatctgcatagagctggtctcactgtggcgcaggcccc

SEQ ID NO: 1228 - protein, 258 aa, Homo sapien; identical to SEQ ID NO: 1113

SEQ ID NO: 1229 - DNA, 2730 bp, Homo sapien
ggcacgagggttcccgccaggtccgtgccgggcgagagagatgctgcccggcccgcctcggctttgaggcgagagaagtgtcccagacccatttcgccttgctgacggcgtcgagccctggccagacatgtccacagggttctccttcgggtccgggactctgggctccaccaccgtggccgccggcgggaccagcacaggcggcgttttctccttcggaacgggagcgtctagcaacccttctgtggggctcaattttggaaatcttggaagtacttcaactccagcaactacatctgctccttcaagtggttttggaaccgggctctttggatctaaacctgccactgggttcactctaggaggaacaaatacaggaatagcaacaactataactacaggattaactctgggaacgccagccactacatctgcagctacaacaggcttcagtttaggattcaataaacctgcagcatctgccacaccatttgctctacctattacctctacctcagctagcggtctgactctttcgtctgctctgacatcaactccagcagcatccacaggatttactctaaataatttgggtgggacaacagccacaactacaactgcatcaacaggcctctctttagggggagccttagctggtttgggaggttcacttttccagagtacaaacacaggaacatcaggacttggacagaatgctttagggttgactttgggaactacagcagctacttcaactgcaggcaatgaaggccttggtggtatagatttcagtagctcctcagataaaaagagtgataaaacgggaacaagaccagaggatagtaaagctctgaaggatgaaaatctacctcctgtcatctgccaggatgttgaaaatctccagaaatttgtgaaggagcagaaacaagttcaagaagaaattagtagaatgtcttcaaaagcaatgcttaaggtacaagaagatattaaagctctgaagcagctcctgtcgttggctgccaatggaatacagagaaacactctcaacattgacaaattgaaaatagaaactgctcaggagttgaagaatgctgaaatagctttaagaacccagaagacaccacctggacttcaacatgaatatgcagctcctgctgactacttcagaatcttggttcagcaatttgaggtacagcttcagcagtacaggcagcagattgaagaactagaaaaccatcttgccactcaagcaaataattcacatataacccctcaagatttgtcaatggctatgcagaaaatttatcaaacatttgtagctttagcggcacaacttcagtctattcatgaaaatgtaaaggttctgaaagaacagtaccttggctacaggaaaatgttcttgggagatgctgttgatgtgtttgaaacaaggcgagcagaagccaagaagtggcagaacacacccagagttactactggacccactcctttcagcaccatgccaaacgcagcagccgttgccatggctgcaacacttacacagcagcaacagcctgctacagggccacagccatctctgggagttagttttggaacgccattcggctcaggtattggcactggcttgcaatcaagtggcttaggttcttcaaaccttggaggatttggaactagctctggttttggatgcagcaccacaggggcctccacatttggatttggaacaacaaataaaccctcaggaagtcttagtgcaggctttggcagctcaagtacatctgggtttaacttcagcaatcctggcatcacggcatcagctggtttgacttttggggtgtccaatcctgcctctgcaggttttggaacaggaggacaactccttcagttgaagaaacctccagctggaaacaaaagaggaaaaagataaacatgggttgatgtgttgagagaatccatagcagcaccgttcattctatgagtctatttttctaatgatgcagtaattaaattgcatcccaggagatttataaagttttgatatttttccctactctggaatttgaactttcttcatgtttgccatactgaacatcttttttcttgtggaatttaaagtccagctgtgttttctttttaatttgattctcagtgtaagaaatgttctgattacatcactgattggtaatggttagaaaccattaacctaaaacttactatttaacctagtgtttttgttgatgaggtttacattatgtgaatacatgcacatttgtttcttatacaggtggtgtgaactctagggcctatactagaatcaatttgttccttgttaaaggccttttgaattatactgcagggcatcttgtgaatatgtatgtaaatatatacagaataatacacacagttgtgtgtgcatataaaatacatatttacgccaggcgtggtggctcacgcctgtaatcccagcactttgggaggccgaggcaggcggatcacctgaggtcaggagtttgagaccagcctgacatggtgaaaccccatctctacgaaaaatacaaaaattagctgggcatagtggcgggtacctataatcccagctactcgggaggctgaggcacgagaatcacttgaagccgggaggtgggggttgcagtgagccgagatcacaccactgcactccagcctgggcaacaagagcaaaactccgtctcaaaaaaaaaaaaaaaaaaa

SEQ ID NO: 1230 - protein, 599 aa, Homo sapien
MSTGFSFGSGTLGSTTVAAGGTSTGGVFSFGTGASSNPSVGLNFGNLGSTSTPATTSAPSSGFGTGLFGSKPATGFTLGGTNTGIATTITTGLTLGTPATTSAATTGFSLGFNKPAASATPFALPITSTSASGLTLSSALTSTPAASTGFTLNNLGGTTATTTTASTGLSLGGALAGLGGSLFQSTNTGTSGLGQNALGLTLGTTAATSTAGNEGLGGIDFSSSSDKKSDKTGTRPEDSKALKDENLPPVICQDVENLQKFVKEQKQVQEEISRMSSKAMLKVQEDIKALKQLLSLAANGIQRNTLNIDKLKIETAQELKNAEIALRTQKTPPGLQHEYAAPADYFRILVQQFEVQLQQYRQQIEELENHLATQANNSHITPQDLSMAMQKIYQTFVALAAQLQSIHENVKVLKEQYLGYRKMFLGDAVDVFETRRAEAKKWQNTPRVTTGPTPFSTMPNAAAVAMAATLTQQQQPATGPQPSLGVSFGTPFGSGIGTGLQSSGLGSSNLGGFGTSSGFGCSTTGASTFGFGTTNKPSGSLSAGFGSSSTSGFNFSNPGITASAGLTFGVSNPASAGFGTGGQLLQLKKPPAGNKRGKR

SEQ ID NO: 1231 - DNA, 728 bp, Homo sapien
ttttcgagaccggaagtgagtgatcgaaagcatggcgtcggtggtgttggcgctgaggacccggacagccgttacatccttgctaagccccactccggctacagctcttgctgtcagatacgcatccaagaagtcgggtggtagctccaaaaacctcggtggaaagtcatcaggcagacgccaaggcattaagaaaatggaaggtcactatgttcatgctgggaacatcattgcaacacagcgccatttccgctggcacccaggtgcccatgtgggtgttgggaagaataaatgtctgtatgccctggaagaggggatagtccgctacactaaggaggtctacgtgcctcatcccagaaacacggaggctgtggatctgatcaccaggctgcccaagggtgctgtgctctacaagacttttgtccacgtggttcctgccaagcctgagggcaccttcaaactggtagctatgctttgatgtcctgttgaggccatcggacagagactggagcccaggtgacaggagatggtgataccagaagtcaagggttggggtggcgacacggcctcccgaggaagaggtctgcttgatggtgactctgcaggagactctgaagtgactgctgggaaaccctttgggagacctgacctggggccaaaaataaagtgagccagcgtcatgaacgcatgctatttagggacaaaaaaaaaaaaaaaaaaaaaaaaaa

SEQ ID NO: 1232 - protein, 148 aa, Homo sapien
MASVVLALRTRTAVTSLLSPTPATALAVRYASKKSGGSSKNLGGKSSGRRQGIKKMEGHYVHAGNIIATQRHFRWHPGAHVGVGKNKCLYALEEGIVRYTKEVYVPHPRNTEAVDLITRLPKGAVLYKTFVHVVPAKPEGTFKLVAML

SEQ ID NO: 1233 - DNA, 2824 bp, Homo sapien
cccgagccccgcccctccgggcccgggtcggcgcgcccagcctgccagccgcgctgctgctgctcctcctgctgtgggaccgctgaccgcgcggctgctccgctctccccgctccaagcgccgatctgggcacccgccaccagcatggacgctcgccgcgtgccgcagaaagatctcagagtaaagaagaacttaaagaaattcagatatgtgaagttgatttccatggaaacctcgtcatcctctgatgacagttgtgacagctttgcttctgataattttgcaaacacgaaacctaaattcaggtcagatatcagtgaagaactggcaagtgttttttatgaggactctgataatgaatctttctgcggcttttcagaaagtgaggtgcaagatgtattagaccattgtggatttttacagaaaccaaggccagatgtcactaacgaactggccggtatttttcatgccgactctgacgatgaatcattttgcggtttctcagagagtgagatacaagatggaatgaggctgcagtcagttcgggaaggctgtaggacccgcagccagtgcaggcactctggacctctcagggtggcgatgaagtttccagcgcggagtaccaggggagcaaccaacaaaaaagcagagtcccgccagccctcagagaattctgtgactgattccaactccgattcagaagatgaaagtggaatgaattttttggagaaaagggctttaaatataaagcaaaacaaagcaatgcttgcaaaactcatgtctgaattagaaagcttccctggctcgttccgtggaagacatcccctcccaggctccgactcacaatcaaggagaccgcgaaggcgtacattcccgggtgttgcttccaggagaaaccctgaacggagagctcgtcctcttaccaggtcaaggtcccggatcctcgggtcccttgacgctctacccatggaggaggaggaggaagaggataagtacatgttggtgagaaagaggaagaccgtggatggctacatgaatgaagatgacctgcccagaagccgtcgctccagatcatccgtgacccttccgcatataattcgcccagtggaagaaattacagaggaggagttggagaacgtctgcagcaattctcgagagaagatatataaccgttcactgggctctacttgtcatcaatgccgtcagaagactattgataccaaaacaaactgcagaaacccagactgctggggcgttcgaggccagttctgtggcccctgccttcgaaaccgttatggtgaagaggtcagggatgctctgctggatccgaactggcattgcccgccttgtcgaggaatctgcaactgcagtttctgccggcagcgagatggacggtgtgcgactggggtccttgtgtatttagccaaatatcatggctttgggaatgtgcatgcctacttgaaaagcctgaaacaggaatttgaaatgcaagcataatatctggaaaatttgctgcctgccttctacttctcaaatctttcttgtaaaagtttccaattttttcactgaaacctgagttaaaaatcttgatgatcagcctgtttcataagaaactccaatcaagttaatcttagcagacatgtgtttctggagcatcacagaaggtatattgctagttacactttgccctcctgcagtttcttctctgctcccaacccccatctcatagcatccccctctatttccaatgctcctctccaaccgcttagtttctgaatttcttttaaattacagttttatgaaagcatattttatttacttggtgttgaaatagccctcataaaacctaagcacttggaaacacaataatagtattaactaactagatctattgaatttcagagaagagccttctaacttgtttacacaaaaacgagtatgatttagcattcatactagttgaaatttttaatagaatcaaggcacaaaagtcttaaaaccatgtggaaaaattaggtaattattgcagattgatgtctctcaatcccatgtattgcgcttatgttacaagttgttgtcacagttgagacttaatttctcctaatttcttctgcccgaagggtaagtggtgcgtccagcttacacaatcataattcaaaggttggtgggcaatgtaatacttaattaaaataatgatggaagagctatctggagattatgagtaagctgatttgaattttcagtataaaactttagtataattgtagtttgcaaagtttatttcagttcacatgtaaggtattgcaaataaattcttggacaattttgtatggaaacttgatattaaaaactagtctgtggttctttgcagtttcttgtaaatttataaaccaggcacaaggttcaagtttagattttaagcacttttataacaatgataagtgcctttttggagatgtaacttttagcagtttgttaacctgacatctctgccagtctagtttctgggcaggtttcctgtgtcagtattccccctcctctttgcattaatcaaggtatttggtagaggtggaatctaagtgtttgtatgtccaatttacttgcatatgtaaaccattgctgtgccattcaatgtttgatgcataattggaccttgaatcgataagtgtaaatacagcttttgatctgtaatgcttttatacaaaagtttattttaataataaaatgtttgttctaacttgtctgcttttttaaaaataatcttactgtacttaattctaattttttcctcatatttaaataaaaggccatttccaccttttct

SEQ ID NO: 1234 - protein, 450 aa, Homo sapien
MDARRVPQKDLRVKKNLKKFRYVKLISMETSSSSDDSCDSFASDNFANTKPKFRSDISEELASVFYEDSDNESFCGFSESEVQDVLDHCGFLQKPRPDVTNELAGIFHADSDDESFCGFSESEIQDGMRLQSVREGCRTRSQCRHSGPLRVAMKFPARSTRGATNKKAESRQPSENSVTDSNSDSEDESGMNFLEKRALNIKQNKAMLAKLMSELESFPGSFRGRHPLPGSDSQSRRPRRRTFPGVASRRNPERRARPLTRSRSRILGSLDALPMEEEEEEDKYMLVRKRKTVDGYMNEDDLPRSRRSRSSVTLPHIIRPVEEITEEELENVCSNSREKIYNRSLGSTCHQCRQKTIDTKTNCRNPDCWGVRGQFCGPCLRNRYGEEVRDALLDPNWHCPPCRGICNCSFCRQRDGRCATGVLVYLAKYHGFGNVHAYLKSLKQEFEMQA

SEQ ID NO: 1235 - DNA, 781 bp, Homo sapien
ggcacgaggcaactttgtgtaaagcagcttctcccacagagctttccctgcattgttagtgatgtcgggcaaagcatcactctttaacctggggcattggccccagcagggatatcatgggaccgcagccgctccgtgcactgtctctgcccccagaggaagccctgtccatggttcctggtgcacggccacaggcctgccttgaggccaccacatctggtgtctagaacagctgcgggccccacttgggcagaaggaagaggtgctagctgctgcccctgcctgctgtgaacacctgcccagcccttccttgtctgctgaggtgctcagaccagagtgccattaaataccaactgatgtcacggagcggacggtgcattgccaaggactcacagctgtgggctcccttccagctcctcccactttcttggctgggtcttctgaggcctacgtggaatgaactacacatgtggcctcatgcccaagggtttgttagatggcctctgactctgtgggattcaacttgacttttttgccccaggaggctctgtctggaaacaggcttagctttagtgctggggtgggacctgccctgtgggccccagggaggggacagtgggggtgaggccctgaggctgtccagggtctgagctctttgcctccaacctgcttctgccccaaaaggaacaggctgttggtggcaggctcctcccggggagctgtactgtacagaccaaggtgtaaataaacagtttgctcttctaaaaaaaaaaaaaaaaaa

SEQ ID NO: 1236 - protein, 36 aa, Homo sapien
MGPQPLRALSLPPEEALSMVPGARPQACLEATTSGV

SEQ ID NO: 1237 - DNA, 728 bp, Homo sapien
cctcgccccgcctacgcgggaacccaaccgcggcgaccggacgtgcactcctccagtagcggctgcacgtcgtgcaatggcccgctatgaggaggtgagcgtgtccggcttcgaggagttccaccgggccgtggaacagcacaatggcaagaccattttcgcctactttacgggttctaaggacgccggggggaaaagctggtgccccgactgcgtgcaggctgaaccagtcgtacgagaggggctgaagcacattagtgaaggatgtgtgttcatctactgccaagtaggagaaaagccttattggaaagatccaaataatgacttcagaaaaaacttgaaagtaacagcagtgcctacactacttaagtatggaacacctcaaaaactggtagaatctgagtgtcttcaggccaacctggtggaaatgttgttctctgaagattaagattttaggatggcaatcatgtcttgatgtcctgatttgttctagtatcaataaactgtatacttgctttgaattcatgttagcaataaatgatgttaaaaaaactggcatgtgtctaaacaatagagtgctattaaaatgcccatgaacctttagtttgcctgtaatacatggatatttttaagatataaagaagtcttcagaaatagcagtaaaggctcaaaggaacgtgattcttgaaggtgacggtaatacctaaaaactcctaaaggtgcagagc

SEQ ID NO: 1238 - protein, 123 aa, Homo sapien
MARYEEVSVSGFEEFHRAVEQHNGKTIFAYFTGSKDAGGKSWCPDCVQAEPVVREGLKHISEGCVFIYCQVGEKPYWKDPNNDFRKNLKVTAVPTLLKYGTPQKLVESECLQANLVEMLFSED

SEQ ID NO: 1239 - DNA, 1235 bp, Homo sapien
ggcacgagggtcatcgccgcggggcggaggcgacagtgtctagcgggagctccgcgtgtagctacgccggccgcctggctttgagacaacgtgattctccgcagctggtcgcctacccgtgatgttctgcccacgtcgagacctgagctgaaatggcagacgatctcggagacgagtggtgggagaaccagccgactggagcaggcagcagcccagaagcatcagatggtgaaggagaaggagacacagaagtgatgcagcaggagacagttccagttcctgtaccttcagagaaaaccaaacagcctaaagaatgttttttgatacaaccaaaggaaagaaaagagaataccaccaagaccaggaaaagaagaaagaagaaaattactgatgttcttgcaaaatcagaaccaaaaccagggttacctgaagacctacagaagctgatgaaggactattatagcagcagacgcttggtgattgaattagaagaactgaacctgccagactcctgtttcctcaaggccaatgatttgactcacagtctttcctcatacctaaaaggaatttgtcctaagtgggtaaaacttaggaagaaccacagtgagaagaaatcggtcctgatgctgatcatctgcagctcggccgtccgagccctggagctcattaggtcgatgacagcattcagaggagacggcaaagttataaaattatttgcaaagcacataaaggtccaggcgcaggtaaagttgctggagaagcgtgtggtgcacctgggtgtaggaactccggggagaattaaagaacttgttaaacaaggtggccttaatttgagccccttaaaatttctggtttttgactggaactggagagatcagaagttgaggagaatgatggacattcccgagataagaaaggaggtattcgaacttctggaaatgggagtgctcagtctgtgcaagtcagaatccttgaaactgggccttttctaagtctgtgtcctaatgaagattccagttttcacagtagaagttgcatcttatttaatgactctgatacattgcaagcactcagtaaatatcagcaaatagtttatgttaattgtgtcaacagatggatcactggaatgtggggattctgaaacagaaatgaaactgtccttttgacaactctcttatataataaagtatcaccggcttgtgtatgaaaaaaaaaaaaaaaaaaaaaaaaaaaaa

SEQ ID NO: 1240 - protein, 279 aa, Homo sapien
MADDLGDEWWENQPTGAGSSPEASDGEGEGDTEVMQQETVPVPVPSEKTKQPKECFLIQPKERKENTTKTRKRRKKKITDVLAKSEPKPGLPEDLQKLMKDYYSSRRLVIELEELNLPDSCFLKANDLTHSLSSYLKGICPKWVKLRKNHSEKKSVLMLIICSSAVRALELIRSMTAFRGDGKVIKLFAKHIKVQAQVKLLEKRVVHLGVGTPGRIKELVKQGGLNLSPLKFLVFDWNWRDQKLRRMMDIPEIRKEVFELLEMGVLSLCKSESLKLGLF

SEQ ID NO: 1241 - DNA, 1214 bp, Homo sapien; identical to SEQ ID NO: 1225

SEQ ID NO: 1242 - protein, 234 aa, Homo sapien
MAQHGAMGAFRALCGLALLCALSLGQRPTGGPGCGPGRLLLGTGTDARCCRVHTTRCCRDYPGEECCSEWDCMCVQPEFHCGDPCCTTCRHHPCPPGQGVQSQGKFSFGFQCIDCASGTFSGGHEGHCKPWTDCTQFGFLTVFPGNKTHNAVCVPGSPPAEPLGWLTVVLLAVAACVLLLTSAQLGLHIWQLRKTQLLLEVPPSTEDARSCQFPEEERGERSAEEKGRLGDLWV

SEQ ID NO: 1243 - DNA, 2891 bp, Homo sapien
cgttttttaattttaaagttggggggggtctcaatttgttaccctgctggtctcgaactcccggacttaagcgatcctctggctccaagcccactaccagtctcaggtttctttactaaaagatcactacctttttttctcttatctgctgccatgtgagatgtggctttcaccttccgccatgattgtgaggccttcccagccacgtagaactgtaagtccaataaacctcttttgtaaattaaaaaaaaaaaatcactatttaagatactaggatggattgtgactgttgaggagtacttacatatcctacatttgactacattatttccaaaccaagtattccatccaaaggaacatactgctatcatagagaccaaggagggactgtttaaggttgccaaggtgaagcgagctgagaggctttgtcctcgtgccagtaactctgaaatctctcttaattcctgctgtccaggcagcagaatgccatggtttccccaagtaggtagctgctttagcagttaaagcccaaatgtctgttctgttgatcagaggtctctgaatttctgaagtggtgtttcgtttctggtgactgagttaatcctttacaatccctcttgtaaagtgtgctaatagaaagaatccacctttcaaagctgcagaaccagaccgtgccctaaattgaccaacgtagctgatgtgcctcaggaagtctcttgccagctgtccctgtgaagacccccctcctcccccccagctgctgccttgcacactgaagcatctcagactgtgcaaagccgtgtagtcatcaagacagtaaatcccagggcttggttaagtgctgtgtgataacttgtttggatgagacttaacttaaaaccacttacaataaacttgggaaactaccgtcagctgagttcaaatttactgacgccatgatatgaggatgaaggtttattacctggtgacatcatcctgttggtgacatcatcctgttggtgacaaggtggtgatacatctctaatgggacttccctcagtggcaggcaggctgccaagcaactaacccccatcaagtgccagaccctcccagtgttctgagagtcatctccatgctaaacagcctgcgttttatatgatttctctacccagccaaaaaaaaaaatggtccatcatgtacgcagttatctagtcttaagttatattctggcttttttctcccactttattatggagcagaagtaagcctatcatgttcttagaaaggctcttaagaggtgtcctggagtccttgaatcactttagcatctggggtaggatgtgccaccaggaggatttgggctggagcgtgtgtgtttgcctttgacctggactgctgtctgatcttgctgaacactccaccgacatttcctaaagttgctcagtgccaatccagcaaagcagtccattttcccttggccaagattgagatgtattgttttagatacagaagagttcttggatgagccaaggacaagctggggtgtcctatattgaacagacctcgatgaaaatcttgaattcaccccagtgccctctgttggcaagggaaggtgaagattgaaaagttaaaaaagcttttggccacttgagaggatcagggccgcaactcttgaagaagcaaagggctcagtgcattggggtcagcgctggtacagctgaaggatgccggccttgtgcaggtccctccacagggcagcttccagggacagatcgtggtttgcataaaatatcaatggcttcatttttcgttcgaaatagtggtcggaaaatttccagtagttgcttgtgatgaatccataggcactgacctggtcacaggtatgcaaagctgtcagcagcatgagagccccggtactaggcatatataggtctccaaaatgtgtgttaatcaactttgatttcaagaacctttctgtcaggtagctgatgaagtccggatgtagcagcttgaatttactggcagaggcttctggtccaaaataggcgtgcggcctgtcccctttatctaggccctcagggacaggcacgcccagaatggccgatctcagcatcacatagtcgcggatgtctgaggggatgaagatatactgcaggtcctgtccttgtggcacggaggtgaagcccagattccagtaggagacgagggagttcttcatcgtgttcacagtgaaaccatagaaggaagtcttggtgcccacatcgcgctcgaagcctttgatcacagctccattgagtctgaatacatagtcatgggcatcgatgttgggaccctggcgggacccattcagaatgcctccgttgcccaccacggcacaccggatacactttggaggggtgtccctgggcggggcaaacagcttggcactctctgagccgttcagaaggctcagggtggaggcgatgacttggtgagagagcccccgccagccatacggggctttgtgttggctcaggcggtcccagagcgctggggtgaagaggtccccccacagcagcactggaatggagagattgaacaggccacggaagtgggggtgccgctgaatggccaggtgaagcaggtgtcggcaggcctggccctttcctgtccaagaattcgatgccttggattgaaagaatgcttcaaatgatgtggtgtccctggctccggccgctggccccgggtaccgctgcaccgccgagaagtacagggcaaagaggagccccgagcaggcagccgtgagcaggagcagcagccagaagaacgacccgcgcgggagccccatacagccccggcccgcgagcgccccgtccgactgacgtcccaggcagaagggagagaaccgggtgggccgggtggcacttgcggag

SEQ ID NO: 1244 - protein, 52 aa, Homo sapien
RFLILKLGGVSICYPAGLELPDLSDPLAPSPLPVSGFFTKRSLPFFLLSAAM

SEQ ID NO: 1245 - DNA, 4692 bp, Homo sapien
gtggacccagggtggggaactacctcttcctctccacgcggttgagaagaccggtcggcctgggcaacctgcgctgaagatgccgggaaaactccgtagtgacgctggtttggaatcagacaccgcaatgaaaaaaggggagacactgcgaaagcaaaccgaggagaaagagaaaaaagagaagccaaaatctgataagactgaagagatagcagaagaggaagaaactgttttccccaaagctaaacaagttaaaaagaaagcagagccttctgaagttgacatgaattctcctaaatccaaaaaggcaaaaaagaaagaggagccatctcaaaatgacatttctcctaaaaccaaaagtttgagaaagaaaaaggagcccattgaaaagaaagtggtttcttctaaaaccaaaaaagtgacaaaaaatgaggagccttctgaggaagaaatagatgctcctaagcccaagaagatgaagaaagaaaaggaaatgaatggagaaactagagagaaaagccccaaactgaagaatggatttcctcatcctgaaccggactgtaaccccagtgaagctgccagtgaagaaagtaacagtgagatagagcaggaaatacctgtggaacaaaaagaaggcgctttctctaattttcccatatctgaagaaactattaaacttctcaaaggccgaggagtgaccttcctatttcctatacaagcaaagacattccatcatgtttacagcgggaaggacttaattgcacaggcacggacaggaactgggaagacattctcctttgccatccctttgattgagaaacttcatggggaactgcaagacaggaagagaggccgtgcccctcaggtactggttcttgcacctacaagagagttggcaaatcaagtaagcaaagacttcagtgacatcacaaaaaagctgtcagtggcttgtttttatggtggaactccctatggaggtcaatttgaacgcatgaggaatgggattgatatcctggttggaacaccaggtcgtatcaaagaccacatacagaatggcaaactagatctcaccaaacttaagcatgttgtcctggatgaagtggaccagatgttggatatgggatttgctgatcaagtggaagagattttaagtgtggcatacaagaaagattctgaagacaatccccaaacattgcttttttctgcaacttgccctcattgggtatttaatgttgccaagaaatacatgaaatctacatatgaacaggtggacctgattggtaaaaagactcagaaaacggcaataactgtggagcatctggctattaagtgccactggactcagagggcagcagttattggggatgtcatccgagtatatagtggtcatcaaggacgcactatcatcttttgtgaaaccaagaaagaagcccaggagctgtcccagaattcagctataaagcaggatgctcagtccttgcatggagacattccacagaagcaaagggaaatcaccctgaaaggttttagaaatggtagttttggagttttggtggcaaccaatgttgctgcacgtgggttagacatccctgaggttgatttggttatacaaagctctccaccaaaggatgtagagtcctacattcatcgatccgggcggacaggcagagctggaaggacgggggtgtgcatctgcttttatcagcacaaggaagaatatcagttagtacaagtggagcaaaaagcgggaattaagttcaaacgaataggtgttccttctgcaacagaaataataaaagcttccagcaaagatgccatcaggcttttggattccgtgcctcccactgccattagtcacttcaaacaatcagctgagaagctgatagaggagaagggagctgtggaagctctggcagcagcactggcccatatttcaggtgccacgtccgtagaccagcgctccttgatcaactcaaatgtgggttttgtgaccatgatcttgcagtgctcaattgaaatgccaaatattagttatgcttggaaagaacttaaagagcagctgggcgaggagattgattccaaagtgaagggaatggtttttctcaaaggaaagctgggtgtttgctttgatgtacctaccgcatcagtaacagaaatacaggagaaatggcatgattcacgacgctggcagctctctgtggccacagagcaaccagaactggaaggaccacgggaaggatatggaggcttcaggggacagcgggaaggcagtcgaggcttcaggggacagcgggacggaaacagaagattcagaggacagcgggaaggcagtagaggcccgagaggacagcgatcaggaggtggcaacaaaagtaacagatcccaaaacaaaggccagaagcggagtttcagtaaagcatttggtcaataattagaaatagaagatttatatagcaaaaagagaatgatgtttggcaatatagaactgaacattatttttcatgcaaagttaaaagcacattgtgcctccttttgaccacttgccaagtccctgtctctttcagacacagacaagcttcatttaaattatttcatctgatcattatcatttataactttattgttacttcttcatcagtttttccttttgaaaggtgtatgaattcattacatttttattctaatgtattatctgtagattagaagataaaatcaagcatgtatctgcctatactttgtgagttcacctgtctttatactcaaaagtgtcccttaatagtgtccttccctgaaataaatacctaagggagtgtaacagtctctggaggaccactttgagcctttggaagttaaggtttcctcagccacctgccgaacagtttctcatgtggtcctattatttgtctactgagacttaatactgagcaatgttttgaaacaagatttcaaactaatctgggttgtaatacagtttataccagtgtatgctctagacttggaagatgtagtatgtttgatgtggattacctatacttatgttcgttttgatacatttttagcttctcattataaggtgattcatgctttagtgaattcttcatagatagtatatataaaagtacattttaatagaaagccagggttttaaggaatttcacatgtataaggtggctccatagctttatttgtaagtaggctggataaatggtgcttaaatggtaatgtactccacttcttcctattggaagattaacattatttaccaagaaggacttaagggagtaaggggcgcagattagcattgctcaagagtatgtaaaaaaaaaaaaaaaaaaaagaaccaaaccactggaaataatcaaatgcaaaaaggtaacaaattcataactggaaagcaaagagaagaacaagtatgatttggatgataaagcattgttttaatggtgaaaacttcacagatcactaatgtttctagaggttaacttcaagtgggcaagctggggtttttaggtagtcagtggcctagttcctaaagccacagtataggatctgttaaactgaatgtctgttgaaagtttgttttagctgcttggaggcttccttttaagacaaactgtatgtgattaagttgttttgagggaactgaagaacctgatgtagcccctggccagataactgcctgatttctcagatattatttctctgggaaacattctacatagcacaggagcttaagagtggcattatcttctcgccttaatttccagagattatttctgtactgagaatcctggaactactatgctaggaaatttaaagctgcatggtctgtcttgttttcatttaattattgtgaatacctagaatctttcttggtcctgatttctcttgcttaatccagtctttatctctaactgccccttatttgatcaccatgtactaggagctctgatagccagctcagctcctaatccttgaggcaacattctttttctatttgaacttcagttctgtccttgaatcccgactagatatttcttgccctctggtctcagaattctcttggcttttattccttgatccacttgccagttttatcactttacccttgttcctcatggcttcccatcaagccatgggtattaggtgacagtgtaatttattagattctggttttgcccaaatactgggcatgctttaataataactgaaccatttcattatttggataggcatgggtaccttatcaagcagattaaaaggatatggtacccgtcctttagaaaagaacagctaaaaccttgttgtggattatggatttagcctaaagaaaaataatctggcataaattaagagtaagagagaagattaatagaaatttcacttcacataacttaaaacatggctatttcaataaaggactaaagtttctcctggatcccagaattcaacctgtatttataaatgtataatgtatttagctactttttggtttaaatgaacttgttgggttagcttggtaaatgttataatttttactgttttctacaaagaaaatattttctaatttaagttggagctatctgtgcagcagtttctctacagttgtgcataaatgtttttactataaaatgagctaatgtataaaatactgctgtataccataataaagatagtaatacttgaaaaaaa

SEQ ID NO: 1246 - protein, 809 aa, Homo sapien
WTQGGELPLPLHAVEKTGRPGQPALKMPGKLRSDAGLESDTAMKKGETLRKQTEEKEKKEKPKSDKTEEIAEEEETVFPKAKQVKKKAEPSEVDMNSPKSKKAKKKEEPSQNDISPKTKSLRKKKEPIEKKVVSSKTKKVTKNEEPSEEEIDAPKPKKMKKEKEMNGETREKSPKLKNGFPHPEPDCNPSEAASEESNSEIEQEIPVEQKEGAFSNFPISEETIKLLKGRGVTFLFPIQAKTFHHVYSGKDLIAQARTGTGKTFSFAIPLIEKLHGELQDRKRGRAPQVLVLAPTRELANQVSKDFSDITKKLSVACFYGGTPYGGQFERMRNGIDILVGTPGRIKDHIQNGKLDLTKLKHVVLDEVDQMLDMGFADQVEEILSVAYKKDSEDNPQTLLFSATCPHWVFNVAKKYMKSTYEQVDLIGKKTQKTAITVEHLAIKCHWTQRAAVIGDVIRVYSGHQGRTIIFCETKKEAQELSQNSAIKQDAQSLHGDIPQKQREITLKGFRNGSFGVLVATNVAARGLDIPEVDLVIQSSPPKDVESYIHRSGRTGRAGRTGVCICFYQHKEEYQLVQVEQKAGIKFKRIGVPSATEIIKASSKDAIRLLDSVPPTAISHFKQSAEKLIEEKGAVEALAAALAHISGATSVDQRSLINSNVGFVTMILQCSIEMPNISYAWKELKEQLGEEIDSKVKGMVFLKGKLGVCFDVPTASVTEIQEKWHDSRRWQLSVATEQPELEGPREGYGGFRGQREGSRGFRGQRDGNRRFRGQREGSRGPRGQRSGGGNKSNRSQNKGQKRSFSKAFGQ

SEQ ID NO: 1247 - DNA, 5742 bp, Homo sapien
gcgcggggctgagccgcccgggatcagcgcgagcacccagcccgcctcggccgggagggcctgagaaccccgggggcgtgctgagcgtggagctgcccgggctgctggcgcagctggcgcggagcttcgcgctgctgctgcccgtgtacgcgctgggctacctggggctcagcttcagctgggttctcctcgcgctcgcgctgctcgcctggtgtcgccgcagccgcggcctcaaggccctgcgcctgtgccgcgcgctggcgctgctggaagacgaggagcgcgtcgtgcgcctgggggtgcgcgcctgcgacctgcccgcctgggttcattttccagacactgaaagagcagaatggctaaataagactgtaaaacacatgtggcctttcatttgccaatttatagagaagttgtttcgagaaactatagaaccagccgtgcggggagcaaacacccaccttagcacctttagtttcacgaaggtcgacgtgggccagcagcccctcaggatcaatggtgttaaggtatacactgaaaatgtagacaaaaggcaaattattttggaccttcagattagttttgtaggaaattgtgagattgatttggagatcaaacgatatttttgtagagctggtgtgaaaagtatccagattcatggtaccatgcgggtgatcctggaaccgttgattggagatatgcccttagttggagctttgtctatcttcttccttaggaaaccacttttagaaattaactggacaggactgacgaatcttctggatgtccctggattgaatggtttatcagatactatcattttggatataatatcaaactatctggtgcttcccaatcgaatcaccgttccacttgtcagtgaagttcaaatagctcagttgcggtttcctgtaccaaagggtgttctaaggatacattttattgaagctcaggatcttcaggggaaagacacttaccttaagggacttgtcaagggaaagtcagacccctatggaatcattagagttggcaaccaaatcttccaaagcagagtcatcaaggagaacctcagtccaaagtggaatgaagtctatgaggctttagtgtatgaacatcctggacaagaattagagattgagctctttgatgaagacccagacaaggatgactttttaggaagtcttatgattgacctcattgaagttgaaaaggagcgccttttagatgaatggttcactctggacgaggttcccaaggggaagctacacttgagactggagtggctcacgttaatgccaaatgcgtcaaacctcgacaaggtgctaacagacatcaaagctgacaaagaccaagccaacgatggtctttcctctgcattgctgatcttgtacttggattcagcaaggaaccttccgtcagggaagaaaataagcagcaacccaaatcctgttgtccagatgtcagttgggcacaaggcccaggagagcaagattcgatacaaaaccaatgaacctgtgtgggaggaaaacttcactttcttcattcacaatcccaagcgccaggaccttgaagttgaggtcagagacgagcagcaccagtgttccctggggaacctgaaggtccccctcagccagctgctcaccagtgaggacatgactgtgagccagcgcttccagctcagtaactcgggtccaaacagcaccatcaagatgaagattgccctgcgggtgctccatctcgaaaagcgagaaaggcctccagaccaccaacactcagctcaagtcaaacgtccctctgtgtccaaagaggggaggaaaacatccatcaaatctcatatgtctgggtctccaggccctggtggcagcaacacagctccatccacaccagtcattgggggcagtgataagcctggtatggaagaaaaggcccagccccctgaggccggccctcaggggctgcacgacctgggcagaagctcctccagcctcctggcctccccaggccacatctcagtcaaggagccgacccccagcatcgcctcggacatctcgctgcccatcgccacccaggagctgcggcaaaggctgaggcagctggaaaacgggacgaccctgggacagtctccactggggcagatccagctgaccatccggcacagctcgcagagaaacaagcttatcgtggtcgtgcatgcctgcagaaacctcattgccttctctgaagacggctctgacccctatgtccgcatgtatttattaccagacaagaggcggtcaggaaggaggaaaacacacgtgtcaaagaaaacattaaatccagtgtttgatcaaagctttgatttcagtgtttcgttaccagaagtccagaggagaacgcttgacgttgccgtgaagaacagtggcggcttcctgtccaaagacaaagggctccttggcaaagtattggttgctctggcatctgaagaacttgccaaaggctggacccagtggtatgacctcacggaagatgggacgaggcctcaggcgatgacatagccgcagcaggcaggaggcgtcctcttcagcgtagctctccacctctacccggaacacaccctctcacagacgtaccaatgttatttttataatttcatggatttagttatacataccttaatagttttataaaattgttgacatttcaggcaaatttggccaatattatcattgaattttctgtgttggatttcctctaggatttcgccagttcctacaacgtgcagtagggcggcggtagctcttgtgtctgtggactctgctcagctgtgtccgtaggagtcggatgtgtctgtgctttattatggccttgtttatatatcactgaggtatactatgccatgtaaatagactattttttataatctttacatgctggtttaaattcagaaggaaatagatcaaggaaatatatatattttcttctaaaacttattaaattcgtgtgacaaataatcattttcatcttggcagcaaaagttctcagtgacctattttgtggtgtttctttttgaaaagaaaagctgaaatattattaaatgctagtatgtttctgcccattatgaaagatgaaataaagtattcaaaatattaacattttcataaatataaggatgtattattgagaagtaagttgaagggcttataaggaaaaatgttttataactgagtaatatattaagagaattgtcatggttcataaatcacattatgctaatctgaaatttcttacataaaaatgaagtgtcttatgtttattttaattgctgttgtaacttactcatgaaacagtatacagacaccttgtacttttcctcaactgtaagagcagactttcaatgttagcaattaagctgttgtcaaacaatcagtcatgagctttgttaattttcaatgttttcccagcctataaaaaaaggaaggtacacgttgtccttttaaaggttgtgaggtagattggagtgagtagacaggatattgcattaaaaattgaaagctcgatctcattattgtcaggaacccccagtgtgacctcacacataggatgtgggacctttgagccgatgtgcactggccaccaccagggttgggggcgccacagctgcgagcccggcccctgctgttctcagcagccacttcccaggctgcctcactttatgccatgactgaccttaatattgggatattgttatgcaatttttatcctgtttagactgttaaaagcaggtttctgtacttaagagtcccccagacctcctgtgaggtgaggctctgttgcagtgtcgtaggctgtgtgtgtctgtaaagaaagaatgcacatatgtagacgattaagtgtatattataagctatatgctgaaaatggcttccatagccatgagaacatcttaaaactatgtgtaaatatattaaggaaagtatagctttgtaatttaaattggagcttttagcttgtttcatggaactatacaacttgtgggtaactcacatgaccaaacaaaccaaagtgcctgtgacggggcgggtggcgtctacccaccctcccttctagcagattcttattttgtttgaatttataaacaaggctggtggctgtctacccaccctcccttctagcagattttgattttgtttcaatttataacttacactttgaaccatgggtttacttataatggagtctgtagcttcacagcatatttcatgtaatcataaagaccagtatattccctcctgctgaatgacatgcgactgtaaagcctctttataaaccatttccaatgttagtatataggattatttgggaagcgtatcaatacctttatagacaaatacgaacatgtatgcacacaaaacatttaactatggtatttatggaagacaggtaacaacattaaatctagttgctttcccttagtattagatttgttgagggttttttaaaaatcaggtctgttgaaagtcttctgtcataatctataaagcagcagcactcatggaaattgtagcatgccagtaatttttaccaacatcccatacatctgagttctgcagtccagtgtgtaatccgctccatgtgtattttgcttaatggaatgctttatttaagcacttaggcagagtagacacaattaaaggtacaaagcccagaggaagtggtagagcagcaccgtgcctgccctgaggcagtggagtcagtagcgctgtccccagggccttgagtgcctggaggtgcttggcctccagtagctgcctccattctcttttaaaaaaagggggtgattctgaggcactgaagtgcctcccagatgtggaggagtgaagccaccatcgaggccacactcagcactccaggatcccagcgatgtcagacactcttgagttgtcaaaacgttaattttcagttttaaataatcagtttatctaagaaaagggaattttaacttttctaccttgagccaagccaatgaagggaaaattaattaacttagtaaatttgaagtgcagctctgttagctcgtacatgtgggttcttatcctgatcctgtgccttaaagtaggaaggtgtttccaagttcagattaaaatagaagcagctggccgggtgcggtggctcacgcctgtaatcccagcactttgggaggccgaggcgggcggatgacctgaggtcaggagttcaagaccagcctggccaacatggagaaaccccatctttactaaaaatacaaaaattagccgggcgtggtggtggagcgcacgcctgtagtcccagctactcgggaggctgaggcaggagaattgcttgaacccaggaggcggaggttgcagtgagccaagatcgcaccactgcactccagcctgggcaacagagtgagactccgtctcaaaaaataaataaaatagaagcagccttgtaactgtatttaccatgataatatattctgcacggtaagaattccttttacagacattctttatcaagaggtcggcccttctttttcaggcacataagccaaatgcaggcctgtgtgtagctgtgtgttttttctgtggttgccgcatttattccacctccagctggaccccccactgcaaatagagaacagcggtgggggatgggggttaaaaagtagagaacctcctttctgttcaactaatttcacgtgacagtgcatgtatttattcaataaaacctttatgttagctc

SEQ ID NO: 1248 - DNA, 1691 bp, Homo sapien
agcgggtttgcgggagcgccgcgtggttagcgtcggcggcttttggcatggcgactttttctggcccggctgggccaatcctgtcgcttaatccgcaggaagatgtcgagtttcaaaaggaggtggcgcaggttcgcaagcgcataacccagcgaaaaaaacaagaacaacttactcctggagtagtctatgtgcgccacctacctaacctacttgacgaaacccagatcttttcatatttctcccagtttggcactgtgacacggttcaggctgtccagaagtaaaaggactggaaatagcaaaggctatgcatttgtggagtttgagtctgaggatgttgccaaaatagttgctgaaacaatgaacaactacctgtttggtgaaagactcttggagtgtcattttatgccacctgaaaaagtacataaagaactctttaaagactggaatattccatttaagcagccatcatatcaatcagtgaaacggtataatcggaatcggacactaacacaaaagctacggatggaggagcgatttaaaaagaaagaaagattactcaggaagaaattagctaaaaaaggaattgactatgattttccttctttgattttacagaaaacggaaagtatttcaaaaactaatcgtcagacgtctacaaaaggccaggttttacgtaagaagaagaaaaaagtttcaggtactcttgacactcctgagaagactgtggatagccagggccccacaccagtttgtacaccaacatttttggagaggcgaaaatctcaagtggctgaactgaatgatgatgataaagatgatgaaatagttttcaaacagcccatatcctgtgtaaaagaagaaatacaagagactcaaacacctacacattcacggaaaaaaagacgaagaagcagcaatcagtgattttcaatgtattatatttcttttgaaaaatataatatttttatgagagtggactttgtatttcactaggtacaatggaatacaacctttgacaagattttcagaggaaaaatacactgtttggtcaagttaaggaaagcagtgtgtaattttggattgcctgcccttggctgaaatacaggggtgcataccatcttgcagtggcttggctgacattgcctctttgtcctggcctctagttttcttttgatatttcatagctctccttagtttactctgcctggatagaaagttgaccactaactgcaggtttaagtactaaactgcagccttttctgtcgccagcaattaaagaccaccaatcttgtttgtccatctacatggtttgtcggggacatttaactcatggaggtgctttagatttcaacatcagatggttgaagctggaagtttaattatatgtagagtgagaaggcagttccagttttagcacagatttgtttatgtgttcagattttaatagagattcaaaaatgactcatttttaccaataatgttaaattagttttggttgtgctagcatgaattaataaccaccattttataccagtatcatcagtgaagaattgtatttcaagattcaaacaataaccagcaattaaacttttttctacaatgtatttgtttgcgagtaggacttgggagtcattggaaaaaaaaaataataaattttccccttcattaacaaaaaaaaaaaaaaaa

SEQ ID NO: 1249 - protein, 293 aa, Homo sapien
MATFSGPAGPILSLNPQEDVEFQKEVAQVRKRITQRKKQEQLTPGVVYVRHLPNLLDETQIFSYFSQFGTVTRFRLSRSKRTGNSKGYAFVEFESEDVAKIVAETMNNYLFGERLLECHFMPPEKVHKELFKDWNIPFKQPSYQSVKRYNRNRTLTQKLRMEERFKKKERLLRKKLAKKGIDYDFPSLILQKTESISKTNRQTSTKGQVLRKKKKKVSGTLDTPEKTVDSQGPTPVCTPTFLERRKSQVAELNDDDKDDEIVFKQPISCVKEEIQETQTPTHSRKKRRRSSNQ

SEQ ID NO: 1250 - DNA, 2126 bp, Homo sapien
ggcgctccgcctgctgcgcgtctacgcggtccccgcgggccttccgggcccactgcgccgcgcggaccgcctcgggctcggacggccggtgtccccggcgcgccgctcgcccggatcggccgcggcttcggcgcctggggctcggggctccggggaggccgtcgcccgcgatgctgctctccaagttcggctccctggcgcacctctgcgggcccggcggcgtggaccacctcccggtgaagatcctgcagccagccaaggcggacaaggagagcttcgagaaggcgtaccaggtgggcgccgtgctgggtagcggcggcttcggcacggtctacgcgggtagccgcatcgccgacgggctcccggtggctgtgaagcacgtggtgaaggagcgggtgaccgagtggggcagcctgggcggcgcgaccgtgcccctggaggtggtgctgctgcgcaaggtgggcgcggcgggcggcgcgcgcggcgtcatccgcctgctggactggttcgagcggcccgacggcttcctgctggtgctggagcggcccgagccggcgcaggacctcttcgactttatcacggagcgcggcgccctggacgagccgctggcgcgccgcttcttcgcgcaggtgctggccgccgtgcgccactgccacagctgcggggtcgtgcaccgcgacattaaggacgaaaatctgcttgtggacctgcgctccggagagctcaagctcatcgacttcggttcgggtgcgctgctcaaggacacggtctacaccgacttcgacggcacccgagtgtacagccccccggagtggatccgctaccaccgctaccacgggcgctcggccaccgtgtggtcgctgggcgtgcttctctacgatatggtgtgtggggacatccccttcgagcaggacgaggagatcctccgaggccgcctgctcttccggaggagggtctctccagagtgccagcagctgatccggtggtgcctgtccctgcggccctcagagcggccgtcgctggatcagattgcggcccatccctggatgctgggggctgacgggggcgccccggagagctgtgacctgcggctgtgcaccctcgaccctgatgacgtggccagcaccacgtccagcagcgagagcttgtgaggagctgcacctgactgggagctaggggaccacctgccttggccagacctgggacgcccccagaccctgactttttcctgcgtgggccgtctcctcctgcggaagcagtgacctctgacccctggtgaccttcgctttgagtgccttttgaacgctggtcccgcgggacttggttttctcaagctctgtctgtccaaagacgctccggtcgaggtcccgcctgccctgggtggatacttgaaccccagacgcccctctgtgctgctgtgtccggaggcggccttcccatctgcctgcccacccggagctctttccgccggcgcagggtcccaagcccacctcccgccctcagtcctgcggtgtgcgtctgggcacgtcctgcacacacaatgcaagtcctggcytccgcgcccgcccgcccacgcgagccgtacccgccgccaactctgttatttatggtgtgaccccctggaggtgccctcggcccaccggggctatttattgtttaatttatttgttgaggttatttcctctgagcagtctgcctctcccaagccccaggggacagtggggaggcaggggagggggtggctgtggtccagggaccccaggccctgattcctgtgcctggcgtctgtcctggccccgcctgtcagaagatgaacatgtatagtggctaacttaaggggagtgggtgaccctgacacttccaggcactgtgcccagggtttgggttttaaattattgactttgtacagtctgcttgtgggctctgaaagctggggtggggccagagcctgagcgtttaatttattcagtacctgtgtttgtgtgaatgcggtgtgtgcaggcatcgcagatgggggttctttcagttcaaaagtgagatgtctggagatcatatttttttatacaggtatttcaattaaaatgtttttgtacatagaaaaaaaaaaaaaaaaaaaaaaagggcgg

SEQ ID NO: 1251 - protein, 382 aa, Homo sapien
RSACCASTRSPRAFRAHCAARTASGSDGRCPRRAARPDRPRLRRLGLGAPGRPSPAMLLSKFGSLAHLCGPGGVDHLPVKILQPAKADKESFEKAYQVGAVLGSGGFGTVYAGSRIADGLPVAVKHVVKERVTEWGSLGGATVPLEVVLLRKVGAAGGARGVIRLLDWFERPDGFLLVLERPEPAQDLFDFITERGALDEPLARRFFAQVLAAVRHCHSCGVVHRDIKDENLLVDLRSGELKLIDFGSGALLKDTVYTDFDGTRVYSPPEWIRYHRYHGRSATVWSLGVLLYDMVCGDIPFEQDEEILRGRLLFRRRVSPECQQLIRWCLSLRPSERPSLDQIAAHPWMLGADGGAPESCDLRLCTLDPDDVASTTSSSESL

SEQ ID NO: 1252 - DNA, 4415 bp, Homo sapien
gaccgcggctgcaggaacggaggcggaaggggccctgcggcgacgacgtcgtcgacgggggtggccgtgggagctgagcacggagaagactccctctctcggaagccggatcccgagccgggcaggatggatcaccaccagccggggactgggcgctaccaggtgcttcttaatgaagaggataactcagaatcatcggctatagagcagccacctacttcaaacccagcaccgcagattgtgcaggctgtgtcttcagcaccagcacttgaaactgactcttcccctccaccatatagtagtattactgtggaagtacctacaacttcagatacagaagtttacggtgagttttatcccgtgccacctccctatagcgttgctacctctcttcctacatacgatgaagctgagaaggctaaagctgctgcaatggcagctgcagcagcagaaacatctcaaagaattcaggaggaagagtgtccaccaagagatgacttcagtgatgcagaccagctcagagtggggaatgatggcattttcatgctggcatttttcatggcatttattttcaactggcttggattttgtttatccttctgtatcaccaataccatagctggaaggtatggtgctatctgcggatttggcctttccttgatcaaatggatccttattgtcaggttttctgattattttactggatatttcaatggacagtattggctttggtggatatttcttgtacttggcctgctccttttcttcagaggatttgttaattatctaaaagtcagaaacatgtctgaaagtatggcagctgctcatagaacaaggtatttcttcttattgtagagactgcatcaacccgacattcctttcttataccaatgtgaaatttccagatcatctgtaaacctacaactttaatagaagactactaataacagaagacaaattagtgaagaaaagacggagtttcgaaattgaatggcagggtggtttttgcttacaagccatttctgttcattctttaagtatctatatttcatttgttttgcacatatgcatatgtgcccatttaagatatttgcatatacttgatagaaaccataaagttgtagcagttaagtccagtcacatttggttaatcagtgtttgatataattgaaagagttgagtggataaacagtcttccagcttgtaaatgccattgacttctgacctgacatttagtataataaaaatgaaattcttaaccatgtcaaatgatttagtttctggctcttagactcatctggcagttctacacatgaaacatcttttgttatataaggtgtattgaaacctgcagtgctgattattagaaaggatttgtcggatttttgaacatgatatttacattattatttaggaaaactcttcctgtaaataaccatgcataacttactttctgcaatgttttcttagaaattgtgtccagatagctttcactaattttaaattaagtgaactaaatatatatgtgtatatgtatacacatatatatacacacacacatatatatatttagaaacgtgagtgttaaagatagaatttgttttaggacaaattttaagaaaatgtgggaataccaaatgtcctttataagaaaaataaattttgttttaagggacataccagttttagggattttcagatgggaagctgcatttttaggattgcccatcttaagagatcttgcaggaagagattgtattagatattatatttatttcatttaagataattttcaaagttaattttctaaataagataattctcatttgtgtttgtcttttaaaaggccaataaaatatctttcagtatcattgtaataattttttagagtttaatttgtaaagcttagcaaataaaatcttgtactatgaatagcttcttgctttatgactttaggattaacttgtaaaaaacatatcctgaactgagatatgcaaaatactcattttcaagttatggaaatgtgtttgtggcatataggactgtggggtctgtgtgtgtagtgagagtgtgtagccactattataactggaatttaatttacattcataaactactatatttcccatcttgcaaatcattttatgtctcatctgtttttcctttcggttatatctttggttttgaataccaacatttaaaatgatggtattttatcttttaaacttaaaaattatttaatacagctatatggaccttataaaattgatttcttatttattattagacattactactaaaaggtacatctaactattcagggacatttttccatttccaaaaaataaaatttattatgctttataacctcttctgtattttctaattttttcattgtctttgataaataaaacagttttgttttgctaatatagcctattttttgttttgtctcattcagtttactttcctgcgtagaatttttattgttatattaaaatttttattgttgtattaaagtacctgtgttacaccccttgaagtaagacagtagcatggggtaaagaaaaaatatttagtttagttgcctaatttggaagttaattaaaattaaactgtactaataacatattcaaactcatgctggatctctttcatattaatttcttatagacctgtactttattctttcaataatttttaaatgaaattaagctttgctacatggtaattaaataattactaggaagcttagctatcaaacatcgacttactaaaatttcattttagcttttatggtatatgtgcttgttttctgaatatggatacatgttacttttgatccagcatcaaaacttcactttttgttttgacttttccccccaaatctgtaaggttcaagtatacatattactgaatcctctataattggcataattcaatggtagccttaaatctcatcatgtaagcaggggaatcagaatgttattttcaagaacttaatgttcccttcagatatataaaatcctgcatacttcatttcctgtgagcttgaacagctgctgttgtgttttggggatgcttgatcatctttgcactctgccttaaagattgaaaaatcaaaactcttgttagggtatctaaacatttttgagtgtgaactggggattggaagttaatacaaaaaaatttcaaattatttctattgtaaatgaataagctagtcatggctaggataatccattttcatgtatttatgcaataaactgaattttaaggcaaaaacaacacttttctatatagtgtatgcaggacagattttagaaacttagattaaaatacaaatcccattacatttggttaaaatgaatctctgcttaatggaaaaaatactaatctttagcctattttgagtctataagatatatttcattttagacatgccttctaagttgttcacagatttttacctgctaaaacaatattatttccagtaaaacctctcctaacaggaaaagtggagttcaaaatatccaattggagaaaaattcagagttccttcattaaatataatttttttcatctagtatgtactatttcaagaagtgcaaaaagtaatgatagtgaatgtgataccatacttaactaaggtaatatatatccttagtttgctcaaaagagtcctggttattcctgttttctcagcttaatagtgcctcatcgtactctcaaaagtgttctaatttggaggataagttatatgatcatcctgtgtataattgtagactgtaccaagaagcaactaccttagctccactgccctttgagggatggaactggggtaagggcaggagccagttattattgccacagtgttttctaatgaaccatttggcctgtagaagaggaatagtattttttttaatagttgtatttgaatgattccagcttatcgtaaatactaaactgaatggcttttatatttttaactgctgttaaatgttattttagcatttattagttgtttattatttaattcttcaaatagtcatatgaaaacatatatttgataaaggtcaattgttagatgataatgtgccattcattatcataggaatgtccttgcccatatataaaacatgctggcatgtattttacttgttaataaagttgtatagatgtggaagtgtgaacctgtgatgcatccttttcaaaatcagtttaagattcgcatattatcatgactgtgacctcactaaactgtttatgtgacaaacctttcaagattggagatgaaaacaacacttgtgaaattaggttggggttgcaacatcttttaacttctcagttatttgtatgtcaggaaacagattgtggtttaattttaataaacaaaatatcatctttttgaaaat

SEQ ID NO: 1253 - protein, 284 aa, Homo sapien
DRGCRNGGGRGPAATTSSTGVAVGAEHGEDSLSRKPDPEPGRMDHHQPGTGRYQVLLNEEDNSESSAIEQPPTSNPAPQIVQAVSSAPALETDSSPPPYSSITVEVPTTSDTEVYGEFYPVPPPYSVATSLPTYDEAEKAKAAAMAAAAAETSQRIQEEECPPRDDFSDADQLRVGNDGIFMLAFFMAFIFNWLGFCLSFCITNTIAGRYGAICGFGLSLIKWILIVRFSDYFTGYFNGQYWLWWIFLVLGLLLFFRGFVNYLKVRNMSESMAAAHRTRYFFLL

SEQ ID NO: 1254 - DNA, 4415 bp, Homo sapien; identical to SEQ ID NO: 1252

SEQ ID NO: 1255 - DNA, 2457 bp, Homo sapien
acaggaagtgaagagcttccgccgggagaccgcggctgcaggaacggaggcggaaggggccctgcggcgacgacgtcgtcgacgggggtggccgtgggagctgagcacggagaagactccctctctcggaagccggatcccgagccgggcaggatggatcaccaccagccggggactgggcgctaccaggtgcttcttaatgaagaggataactcagaatcatcggctatagagcagccacctacttcaaacccagcaccgcagattgtgcaggctgcgtcttcagcaccagcacttgaaactgactcttcccctccaccatatagtagtattactgtggaagtacctacaacttcagatacagaagtttacggtgagttttatcccgtgccacctccctatagcgttgctacctctcttcctacatacgatgaagctgagaaggctaaagctgctgcaatggcagctgcagcagcagaaacatctcaaagaattcaggaggaagagtgtccaccaagagatgacttcagtgatgcagaccagctcagagtggggaatgatggcattttcatgctggcatttttcatggcatttattttcaactggcttggattttgtttatccttctgtatcaccaataccatagctggaaggtatggtgctatctgcggatttggcctttccttgatcaaatggatccttattgtcaggttttctgattattttactggatatttcaatggacagtattggctttggtggatatttcttgtacttggcctgctccttttcttcagaggatttgttaattatctaaaagtcagaaacatgtctgaaagtatggcagctgctcatagaacaaggtatttcttcttattgtagagactgcatcaacccgacattcctttcttataccaatgtgaaatttccagatcatctgtaaacctacaactttaatagaagactactaataacagaagacaaattagtgaagaaaagacggagtttcgaaattgaatggcagggtggtttttgcttacaagccatttctgttcattctttaagtatctatatttcatttgttttgcacatatgcatatgtgcccatttaagatatttgcatatacttgatagaaaccataaagttgtagcagttaagtccagtcacatttggttaatcagtgtttgatataattgaaagagttgagtggataaacagtcttccagcttgtaaatgccattgacttctgacctgacatttagtataataaaaatgaaattcttaaccatgtcaaatgatttagtttctggctcttagactcatctggcagttctacacatgaaacatcttttgttatataaggtgtattgaaacctgcagtgctgattattagaaaggatttgtcagatttttgaacatgatatttacattattatttaggaaaactcttcctgtaaataaccatgcataacttactttctgcaatgttttcttagaaattgtgtccagatagctttcactaattttaaattaagtgaactaaatatatatgtgtatatgtatactcatatatatacacacacacacatatatatatctagaaacgtgagtgttaaagatagaatttgttttaggacaaattttaagaaaatgtgggaataccaaatgtcctttataagaaaaataaattttattttaagggacatactagttttagggattttcagatgggaagctgcatttttaggattgcccatcttaagagatcttgcaggaagagattgtattagatattatatttatttcatttaagataattttcaaagttaattttctaaataagataattctcatttgtgtttgtcttttaaaaggccaataaaatatctttcagtatcattgtaataattttttagagtttaatttgtaaagcttagcaaataaaatcttgtactatgaatagcttcttgctttatgactttaggattaacttgtaaaaaacatatcctgaactgagatatgcaaaatactcattttcaagttatggaaatgtgtttgtggcatataggactgtggggtctgtgtgtgtagtgagagtgtgtagccactattataactggaatttaatttacattcataaactactatatttcccatcttgcaaatcattttatgtctcatctgtttttcctttcggttatatctttggttttgaataccaacatttaaaatgatggtattttatcttttaaacttaaaaattatttaatacagctatatggaccttataaaattgatttcttatttattattagacattactactaaaaggtacatctaactattcagggacatttttccatttccaaaaaataaaatttattatgctttataacctcttctgtattttctaattttttcattgtctttgataaataaaacagttttgttttgct

SEQ ID NO: 1256 - protein, 242 aa, Homo sapien
MDHHQPGTGRYQVLLNEEDNSESSAIEQPPTSNPAPQIVQAASSAPALETDSSPPPYSSITVEVPTTSDTEVYGEFYPVPPPYSVATSLPTYDEAEKAKAAAMAAAAAETSQRIQEEECPPRDDFSDADQLRVGNDGIFMLAFFMAFIFNWLGFCLSFCITNTIAGRYGAICGFGLSLIKWILIVRFSDYFTGYFNGQYWLWWIFLVLGLLLFFRGFVNYLKVRNMSESMAAAHRTRYFFLL

SEQ ID NO: 1257 - DNA, 8570 bp, Homo sapien
gccttataagtggtttagtgctcagttggctctagtaaccagaggacacagaaagtatcttttggaaagtttagccacctgtgctttctgactcagagtgcatgcaacagttagatcatgcaacagttagattatgtttagggttaggattttcaaagaatggaggttgctgcactcagaaaataattcagatcatgtttatgcattattaagttgtactgaattctttgcagcttaatgtgatatatgactatcttgaacaagagaaaaaactaggagatgtttctcctgaagagcttttggggttgggaactattcttttttaattgctgtactacttaacattgttctaattcagtagcttgaggaacaggaacattgttttctagagcaagataataaaggagatgggccatacaaatgttttctactttcgttgtgacaacattgattaggtgttgtcagtactataaatgcttgagatataatgaatccacagcattcaaggtcaggtctactcaaagtctcacatggaaaagtgagttctgcctttcctttgatcgagggtcaaaatacaaagacatttttgctagggcctacaaattgaatttaaaaactcactgcactgattcatctgagcttttggttagtattcatggctagagtgaacatagctttagtttttgctgtgtaaaagtgttttcataagttcactcaagaaaaatgcagctgttctgaactggaatttttcagcattctttagaattttaaatgagtagagagctcaacttttattcctagcatctgcttttgactcatttctaggcagtgcttatgaagaaaaattaaagcacaaacattctggcattcaatcgttggcagattatcttctgatgacacagaatgaaagggcatctcagcctctctgaacttgtaaaaatctgtccccagttcttccatcggtgtagttgttgcatttgagtgaatactctcttgatttatgtattttatgtccagattcgccatttctgaaatccagatccaacacaagcagtcttgccgttagggcattttgaagcagatagtagagtaagaacttagtgactacagcttattcttctgtaacatatggtttcaaacatctttgccaaaagctaagcagtggtgaagtgaaaagggcatattgccccaaggttacactgaagcagctcatagcaagttaaaatattgtgacagatttgaaatcatgtttgaatttcatagtaggaccagtacaagaatgtccctgctagtttctgtttgatgtttggttctggcggctcaggcattttgggaactgttgcacagggtggagtcaaaacaacctacatataaaaagagaaaaagagaaacttgtccatttagctttcataagaaatcccatggcaaagggtaataaaaaggacctaatcttaaaaatacaatttctaagcacttgtaagaacccagtgggttggagcctcccactttgtccctcctttgaagtggatgggaactcaaggtgcaaagaacctgttttggaagaaagcttggggccatttcagccccctgtattctcatgattttctctcaggaagcacacactgtgaatggcagacttttcatttagccccaggtgacttactaaaaatagttgaaaattattcacctaagaatagaatctcagcattgtgttaaataaaaatgaaagctttagaaggcatgagatgttcctatcttaaataaagcatgtttcttttctatagagaaatgtatagtttgactctccagaatgtactatccatcttgatgagaaaactcttaaatagtaccaaacattttgaactttaaattatgtatttaaagtgagtgtttaagaaactgtagctgcttcttttacaagtggtgcctattaaagtcagtaatggccattattgttccattgtggaaattaaattatgtaagcttcctaatatcataaacatattaaaattcttctaaaatattgcttttcttttaagtgacaatttgactattcttatgataagcacatgagagtgtcttacattttccaaaagcaggctttaattgcatagttgagtctaggaaaaaataatgttaaaagtgaatatgccaccataattacttaattatgttagtatagaaactacagaatatttaccctggaaagaaaatattggaatgttattataaactcttagatatttatataattcaaaagaatgcatgtttcacattgtgacagataaagatgtatgatttctaaggctttaaaaattattcataaaacagtgggcaatagataaaggaaattctggagaaaatgaaggtatttaaagggtagtttcaaagctatatatattttgaaggatatattctttatgaacaaatatattgtaaaaatttatactaaggtcatctggtaactgtgggattaatatggtcgaaaacaaatgttatggagaagctgtcccaagcaaactaaattacctgtacttttttcccatttcaagggaagaggcaaccacatgaagcaatacttcttacacatgcctaagaacgttcattgaaaaaataaatttttaaaaggcatgtgtttcctatgccaccaatacttttgaaaaattgtgaaccttacccaaaaccatttatcatgtccattaagtatatttgggtatataattaggaagatatttacatgttccatctccacagtggaaaaacttattgaggctaccaaagtgtgccaagaaatgtaagtccttagagtaattagaaatgctgttttcctcaaaagcatgagaaactagcattttcatttcttatttactccctttctatatcaatgcaattcacaacccaattttaatacatccctatatctcaagcatttctatcttgtactttttcagaaaataaaccaaaaataatccttggtctctctatcttctgaccttgtaagcaacagaaatgtaaaaacagaaggggtccaatttttacacgtttttttctcaagtagcctttctggggatttttattttcttaatgaagtgccaatcagcttttcaaaatgttttctatttctcagcatttccaggaagtgataacgtttagctaaatgagtagaagtggacttccttcaacatattgttaccttgtctagccttaggaagaaaacaagagccacctgaaaataaatacaggctcttttcgagcatctgctgaaatactgttacagcaatttgaagttgatgtggtaggaaaggaaggtgacttttcttgcaaaagtctttctaaacattcacactgtcctaagagatgagctttcttgttttattccggtatattccacaaggtggcacttttagagaaaaacaaatctgatgaagactaaagaggtacttctaaaagagatttcattctaactttatttttctgcgcatatttaactctttcctagcacttgttttttgggatgattaatagtctctataatgttctgtaacttcaatattttacttgttacctaggttctgaacaattgtctgcaaataaattgttcttaaggatggataatacacccattttgatcatttaagtaaagaaagcctagtcattcattcagtcaagaaaaaatttttgaagtacccagttaccttacttttctagattaaaacaggcttagttactaaaaaggcagtcctcatctgtgaacaggatagtttcgttagaagtataaaactcctttagtggccccagttaaaacacacataccctctctgctgctttcaaattccctagcatggtggcctttcaacattgattaaattttaaaatcctaatttaaagatcaggtgagcaaaatgagtagcacatcagtaattcagtagacaaaacttttgtctgaaaaattgctgtattgaaacagagccctaaaataccaaaagaccaggtaattttaacatttgtggaatcacaaatgtaaattcataagaagctctaattaaaaaaaaaaagtctgaagtatatgagcataacaacttaggagtgtgtctacatacttaacttttgaagttttttggcaactttatatactttttttaaatttacaagtctacttaaagacttcttataccccaaatgattaagttaattttagaggtcacctttctcacagcagtgtcacttgaaatttagtagggaaggatattgcagtatttttcagtttccttagcacagcaccacagaaagcagcttattccttttgagtggcagacactcgacggtgcctgcccaactttcctcctgagtggcaagcagatgagtctcagtaattcatactgaaccaaaatgccacatacactaggggcagtcagaaactggctgagaaatcccccgcctcattcgcccctctgctcccaggaactagagtccagttaaagcccctatgcgaaaggccgaattccaccccagggtttgttataacagtggccagtctgaaccccatttgctcgtgctcaaaacttgattcccacttgaaagccttccgggcgcgctgcctcgttgccccgcccctttggcaggagagaggcagtgggcgaggccgggctggggccccgcctcccactcacctgccggtgcctgaaattatgtgcggccccgcgggctgctttccgaggtcagagtgccctgctgctgtctcagaggcatctgttctgcaaatcttaggaagaaaaatgtccctagtagcaaacgggtgtcttctgtgcataaataagtacaacacaattctccgaaagttcgggtaaaaagagatgcggtagcagctgccctgtgtgaagctgtctaccccgcatctctcaggcgctaagctcagtttttgtttttgtttttgtttttttaaagaaaagatgtataattgcaggaatttttttttatttttttattttccatcattctatatatgtgatggtgaaagatatgcctggaaaagttttgttttgaaaagtttattttctgcttcgtcttcagttggcaaaagctctcaattctttagcttccagtttcttttctctctttttctttgttaggtaattaaaggtatgtaaacaaattatctcatgtagcaggggattttcatgttgagaggaatcttccgtgtgagttgtttggtcacacaaataaccctttctcaattttaggagtttggattgtcaaatgtaggtttttctcaaagggggcatataactacatattgactgccaagaactatgactgtagcactaatcagcacacatagagccacacaattatttaatttctaactctctgtggtccctagaaaaattccgttgatgtgcttaggttaaagttctgaagatacccgttgtacccttacttgaaagtttctaatcttaagttttatgaaatgcaataatatgtatcagctagcaatatttctgtgatcaccaacaactctcagtttgatcttaaagtctgaataataaaacaaatcccagcagtaatacatttcttaaacctcacagtgcatgatatatcttttcattctgatcctgtgtttgcaaaaatatacacatgtatatcatagttcctcactttttattcatttgttttcctattacctgtagtaaatatattagttagtacatggaatttatagcatcagctacccccaggaacagcacctgacaggcgggggattttttttcaagttgttctacatttgcataaattatttctattattattcatgtatgttatttatttctgaatcacactagtcctgtgaaagtacaactgaaggcagaaagtgttaggattttgcatctaatgttcattatcatggtattgatggacctaagaaaataaaaattagactaagcccccaaataagctgcatgcatttgtaacatgattagtagatttgaatatatagatgtagtattttgggtatctaggtgttttatcattatgtaaaggaattaaagtaaaggactttgtagttgtttttattaaatatgcatatagtagagtgcaaaaatatagcaaaaataaaaactaaaggtagaaaagcattttagatatgccttaatttagaaactgtgccaggtggccctcggaatagatgccaggcagagaccagtgcctgggtggtgcctcctcttgtctgccctcatgaagaagcttccctcacgtgatgtagtgccctcgtaggtgtcatgtggagtagtgggaacaggcagtactgttgagaggagagcagtgtgagagtttttctgtagaagcagaactgtcagcttgtgccttgaggcttccagaacgtgtcagatggagaagtccaagtttccatgcttcaggcaacttagctgtgtacagaagcaatccagtgtggtaataaaaagcaaggattgcctgtataatttattataaaataaaagggattttaacaaccaacaattcccaacacctcaaaagcttgttgcattttttggtatttgaggtttttatctgaaggttaaagggcaagtgtttggtatagaagagcagtatgtgttaagaaaagaaaaatattggttcgcgtagagtgcaaattagaactagaaagttttatacgattatcattttgagatgtgttaaagtaggttttcactgtaaaatgtattagtgtttctgcattgccatagggcctggttaaaactttctcttaggtttcaggaagactgtcacatacagtaagcttttttccttctgacttataatagaaaatgttttgaaagtaaaaaaaaaaaaatctaatttggaaatttgacttgttagtttctgtgtttgaaatcatggttctagaaatgtagaaattgtgtatatcagatactcatctaggctgtgtgaaccagcccaagatgaccaacatccccacacctctacatctctgtcccctgtatctcttcctttctaccactaaagtgttccctgctaccatcctggcttgtccacatggtgctctccatcttcctccacatcatggaccacaggtgtgcctgtctaggcctggccaccactcccaacttgacctagccacattcatctagagatggttcctgatgctgggcacagactgtgctcatggcacccattagaaatgcctctagcatctttgtatgcatcttgatttttaaaccaagtcattgtacagagcattcagttttggctgtggtaccaagagaaaaactaatcaagaatataaaccacattccaggctgctgttttctctccatctacaggccacacttttactgtatttcttcatacttgaaattcattctgctattttcatatcagggtacagacttataagggtgcatgttccttaaaggtgcataattattcttattccgtttgcttatattgctacagaatgctctgttttggtgctttgagttctgcagacccaagaagcagtgtggaaattcactgcctgggacacagtcttataagaatgttggcaggtgactttgtatcagatgttgcttctcttttctctgtacacagattgagagttaccacagtggcctgtcgggtccaccctgtgggtgcagcacagctctctgaaagcaagaaccttcctacctattctaacgtttttgccctctaagaaaaatggcctcaggtatggtatagacatagcaagaggggaagggctgtctcactctagcaaccatccctccattacacacagaaagccctcttgaagcaaaagaagaagaaagaaagaaagcttatctctaaggctactgtcttcagaatgctctgagctgaatgctcttgctcctttcccaagaggcagatgaaaatatagccagtttatctatacccttcctatctgaggaggagaatagaaaagtagggtaaatatgtaacgtaaaatatgtcattcaaggaccaccaaaactttaagtaccctatcattaaaaatctggttttaaaagtagctcaagtaagggatgctttgtgacccagggtttctgaagtcagatagccattcttacctgccccttactctgacttattgggaaagggagaactgcagtggtgtttctgttgcagtggcaaaggtaacatgtcagaaaattcagagggttgcataccaataatcctttggaaactggatgtcttactgggtgctagaatgaaaatgtaggtatttattgtcagatgatgaagttcattgtttttttcaaaattggtgttgaaatatcactgtccaatgtgttcacttatgtgaaagctaaattgaatgaggcaaaaagagcaaatagtttgtatatttgtaataccttttgtatttcttacaataaaaatattggtagcaaataaaaataataaaaacaataactttaaactgctttctggagatgaattactctcctggctattttcttttttactttaatgtaaaatgagtataactgtagtgagtaaaattcattaaattccaagttttagcagaaaaa

SEQ ID NO: 1258 - protein, 29 aa, Homo sapien
PYKWFSAQLALVTRGHRKYLLESLATCAF

SEQ ID NO: 1259 - DNA, 2192 bp, Homo sapien
ggggcggagagaggcgagcaccgggaaggggagcgtggggccgctggaatgggtgaatttaaggtccatcgagtacgtttctttaattatgttccatcaggaatccgctgtgtggcttacaataaccagtcaaacagattggctgtttcacgaacagatggcactgtggaaatttataacttgtcagcaaactactttcaggagaaatttttcccaggtcatgagtctcgggctacagaagctttgtgctgggcagaaggacagcgactctttagtgctgggctcaatggcgagattatggagtatgatttacaggcgttaaacatcaagtatgctatggatgcctttggaggacctatttggagcatggctgccagccccagtggctctcaacttttggttggttgtgaagatggatctgtgaaactatttcaaattaccccagacaaaatccagtttgaaagaaattttgatcggcagaaaagtcgcatcctgagtctcagctggcatccctctggtacccacattgcagctggttccatagactacattagtgtgtttgatgtcaaatcaggcagcgctgttcataagatgattgtggacaggcagtatatgggcgtgtctaagcggaagtgcatcgtgtggggtgtcgccttcttgtccgatggcactatcataagtgtggactctgctgggaaggtgcagttctgggactcagccactgggacgcttgtgaagagccatctcatcgctaatgctgacgtgcagtccattgctgtagctgaccaagaagacagtttcgtggtgggcacagccgagggaacagtcttccattttcagctggtccctgtgacatctaacagcagtgagaagcagtgggtgcggacaaaaccgttccagcatcacactcatgacatgcgcactgtggcccacagcccaacagcgctgatatctggaggcactgacacccacttagtctttcgtcctctcatggagaaggtggaagtaaagaattacgatgccgctctccgaaaaatcacctttccccaccgatgtctcatctcctgttctaaaaagaggcagcttctcctcttccagtttgctcatcacttagaactttggcgactgggatccacagttgcaacaggcaagaatggggatactcttccactctctaaaaatgcagatcatttactgcacctaaagacaaagggtcctgagaacattatctgtagctgtatctccccatgtggaagttggatagcctattctacagtttctcggttttttctctatcggctgaattatgaacatgacaacataagcctcaaaagggtttccaaaatgccagcattccttcgctctgcccttcagattttgttttctgaagattcaacaaagctctttgtagcatcaaatcaaggagctctgcatattgttcagctgtcaggaggaagcttcaagcacctgcatgctttccagcctcagtcaggaacagtggaggccatgtgtcttttggcagtcagtccagatgggaattggctagctgcatcaggtaccagtgctggagtccatgtctacaacgtaaaacagctaaagcttcactgcacggtgcctgcttacaatttcccagtgactgctatggctattgcccccaataccaacaaccttgtcatcgctcattcggaccagcaggtatttgagtacagcatcccagacaaacagtatacagattggagccggactgtccagaagcagggctttcaccacctttggctccaaagggatactcctatcacacacatcagttttcatcccaagagaccgatgcacatccttctccatgatgcctacatgttctgcatcattgacaagtcattgccccttccaaatgacaaaaccttactctacaatccatttcctcccacgaatgaatcagatgtcatccggaggcgcacagctcatgcttttaaaatttctaagatatataagcctctactcttcatggatcttttggatgaaagaacactcgtggcagtagaacggcctctggatgacatcattgctcagctcccaccacccattaaaaagaagaaatttggaacctaaaacagggcactgtctgtgtccttccttgaactgtctaccctgttgcttttcacaaatcatggtaataaaacaagttattcttg

SEQ ID NO: 1260 - protein, 686 aa, Homo sapien
MGEFKVHRVRFFNYVPSGIRCVAYNNQSNRLAVSRTDGTVEIYNLSANYFQEKFFPGHESRATEALCWAEGQRLFSAGLNGEIMEYDLQALNIKYAMDAFGGPIWSMAASPSGSQLLVGCEDGSVKLFQITPDKIQFERNFDRQKSRILSLSWHPSGTHIAAGSIDYISVFDVKSGSAVHKMIVDRQYMGVSKRKCIVWGVAFLSDGTIISVDSAGKVQFWDSATGTLVKSHLIANADVQSIAVADQEDSFVVGTAEGTVFHFQLVPVTSNSSEKQWVRTKPFQHHTHDMRTVAHSPTALISGGTDTHLVFRPLMEKVEVKNYDAALRKITFPHRCLISCSKKRQLLLFQFAHHLELWRLGSTVATGKNGDTLPLSKNADHLLHLKTKGPENIICSCISPCGSWIAYSTVSRFFLYRLNYEHDNISLKRVSKMPAFLRSALQILFSEDSTKLFVASNQGALHIVQLSGGSFKHLHAFQPQSGTVEAMCLLAVSPDGNWLAASGTSAGVHVYNVKQLKLHCTVPAYNFPVTAMAIAPNTNNLVIAHSDQQVFEYSIPDKQYTDWSRTVQKQGFHHLWLQRDTPITHISFHPKRPMHILLHDAYMFCIIDKSLPLPNDKTLLYNPFPPTNESDVIRRRTAHAFKISKIYKPLLFMDLLDERTLVAVERPLDDIIAQLPPPIKKKKFGT

SEQ ID NO: 1261 - DNA, 2688 bp, Homo sapien
gaattcggcacgagaatgagccccacagaataaaggtttttcctcttgctgtggcctactggaagccttcctaactctatagctggtaaagtagagcagaaagggccagaatggcttaagatggagctaaatccctatagcattccattttctgctcttgcctcttgaacttagaaggcttgcccatatatcctaacaatctgttctctgagctgttaggccaatccctggtctcaaactcctgacctcaggtgatccacccactatggcctcccaaggtgctgggattgcagatgtgagccaccgtgcctggccagaaaatctggattcttattcctagttcttcatttctgtcacatgcacttagttgacattacatctacatatattagctttttcctacatgagccatctatttacttagtaaccagtgttcttaatgaagtatttagtcttgggtttcttgtaaaatttctctgcattccttagacagtgtactatacatgaaatattcttgttgacctagtaatttatattattccatttaattcttaaacctatggcctttttattgagcacactcttaaatcattatttggcttgtaaacattcatctgaattgtggctacaatcctctttaaataatctaggaaaaaagaaagataaagcttacattttcacagttttggctcttaaacacattccacaaatgccattaagaatttattttgttttaggccagtcatggtggctcatgcctgtaatcccagcaatttgggaggctgaggcaagaactgcttgagcccaggagtttgagactagcctgggcaacatagcaagaccctgtctctaccaaaaaaaaaaaagtttattttgttttagagtcatttaatgtgtttttatgcacaataatagtgggaggttgttttgttgcatttgtttgtttgttttgttttgttttgttttgctttccatgtgggaaaagttaacattggaactgtttctagtaaaagatttttttcaggctgggcacggtggctcatgcctgtgatcccaacactttgggagaccgagggagctggatcacctgaggtcaggagttcgagaccagcctggccaacatggaaaaactccatctccactagaaatacaaaagtagcctggtgtggtggcacatgcctgtaatcccagctacttgggaagctgaggcaggagaatcacttgaacctgggaggtggaggttgcagtgagccaagatcacgccattgcactccagcctgggcaacaagagtgaaactccgtctcaaaaaaaaaaaaaaaaaagatgtttttcatttttttcatgttatctatccaagcactgttccatggtcagcaagtcatatttcataatgtggattttccaaaataattattgaatacagctattctatggctacttttagtgtttttgtggtatgtggtgtgggagtgtttatggaattaccagtatcttaaattttcaaaggaaccttggaagtctatcactctaaatgaaagtctgtcactctacatgaattatgtgctcaaatttgaccaactcagtttaagacacaaaacagtaatttgaagaaggaaaaatgaagagagtttctagtttaatgggttaaatttttgttgttgcaatagtaagtttagtcttcttataatatttctaaatgaaaaatcataggtatttgttaccatgtgtgaagattactttgttaaaagcaaaagtggtcgtgtgatatgctaaatgttaattactgattttatatgtttaaatcacgccaaacaaattatgtctgtgccatccagggtctgttgttaatctttttctgagtacttggattgggataaagggcttgtactatgcactttttattaatgaataaatagaaaacgttagtaacactttgtgttttctgtttggcttttgtgggaagagaagcaagcatcttttgcctagtagatgttaacattgtgtattaaacagtttctttgtaagacctaactaaagacattcctaagagagaacttaagttttaagaaaagttgtgagaaaaatattcataaaatatgcagtatggggccagtattcagaagtagagtttctctcttggaaattagattgcagtcacatttctttggttattttctttctctctctcttcctagaataccaggtaaaatagacatttactttgagggactaatatccaatagtgttaattatttaagcagatatatctagctcaaaaggaaccagacatgtcactgtaccaaaaacacacaaaagtgaaaatttgcttctgttctgtgacctagaatgtgtccagacattaaagatcatgaatactcatatacatgtaaaaatagtaacactgctctggcatgattttgacgtcagtgtttatgtaataacttcagtgttatatttaaaatagataaatttgtgaaataacaatttcttggagacagtcaactttttatgatttaatctaaagattgtcatgtacatgtcaacggatatctgaatcctcagtgaaactgttaagttttcattaaatgactctgctgcaatactagttttcttctcagaaaatggaattcaaataaaataagttttttggtcttggaaaaaaaaaaaaaaaaaaaaaaaaaaaaaaa

SEQ ID NO: 1262 - protein, 43 aa, Homo sapien
MHLVDITSTYISFFLHEPSIYLVTSVLNEVFSLGFLVKFLCIP

SEQ ID NO: 1263 - DNA, 5034 bp, Homo sapien
agcggccgccaacgccgcccggactggagccctgacattgctgcgctcggggggctccaggcagcccgtatcggggcctttatttctcgtcggcggcgccctgcaccgcgcctcgcaaagccaaacaccagagcaccctagaaggtttaactaaaagaatgctcatgtttgacccagttcctgtcaagcaagaggccatggaccctgtctcagtgtcatacccatctaattacatggaatccatgaagcctaacaagtatggggtcatctactccacaccattgcctgagaagttctttcagaccccagaaggtctgtcgcacggaatacagatggagccagtggacctcacggtgaacaagcggagttcacccccttcggctgggaattcgccctcctctctgaagttcccgtcctcacaccggagagcctcgcctgggttgagcatgccttcttccagcccaccgataaaaaaatactcacccccttctccaggcgtgcagcccttcggcgtgccgctgtccatgccaccagtgatggcagctgccctctcgcggcatggaatacggagcccggggatcctgcccgtcatccagccggtggtggtgcagcccgtcccctttatgtacacaagtcacctccagcagcctctcatggtctccttatcggaggagatggaaaattccagtagtagcatgcaagtacctgtaattgaatcatatgagaagcctatatcacagaaaaaaattaaaatagaacctgggatcgaaccacagaggacagattattatcctgaagaaatgtcaccccccttaatgaactcagtgtcccccccgcaagcattgttgcaagagaatcacccttcggtcatcgtgcagcctgggaagagacctttacctgtggaatccccggatactcaaaggaagcggaggatacacagatgtgattatgatggatgcaacaaagtgtacactaaaagctcccacttgaaagcacacagaagaacacacacaggagaaaaaccctacaaatgtacatgggaagggtgcacatggaagtttgctcggtctgatgaactaacaagacatttccgaaaacatactggaatcaaacctttccagtgcccggactgtgaccgcagcttctcccgttctgaccatcttgccctccataggaaacgccacatgctagtctgattgcctctgtgtcctgcctcagcgtgactccccactcacctggctctctctctgtcctgcctcccattatctaacacattttttacatgtacattttaatttgattcagctggtctgaatctctgaatttatatcatccaaaacttccatatggtcagtagtagatgttctctaatcctccctctccttaccacgggtcagacctaaagaatgtgaacacttttttttttttttctggggatgctaagcaaacccttcttacagatacgtttaatgtaataagaacaagggaacatgtaaactaacataaccaattgtcagttctccatgtattcctcaaaagaatgtcagagtaaatgtattagaaatacagtatccagactgctagtccttgccagagacattcttacctctgccctgtgataatattttatgcttgacagtgaaaacaagtgtggccccttgcaccggttagctagaagtacagccagatttcaagctagtgcagtcacctcttccgtcattcttcacaaatcttgtcaacctggatcttagacttcatctgaatcgagttctttgccctcctttgtgcctgcagctcatatggaggtctttgccaccaatgggagatgagcccaaactttcgatctaggtgggtgatgtgtagcagttcaagggaagggtgctgtgttttcatagcatggagtcggaggagagggccatttagcagggggagcagaagaggcaattcctcctgggctaggggttgtcaatgaggtttcaacattttgttagctgtgtgcagcattcccagagcttcagtctctgtgcatactcagctttgtagaaccatgctgcaaagccatataccgatggggttatccatgcaactatctccattcctacaatgtccttaatatgagatcatcaaacattgatagtagggactccatggaatatttgcccagtaatggtaagaaatctttcgggtaagagtatggatggttcttcttttacccaatctgcttatagctttttttgtaaacagggaaatgttgagtggtacttgtattcccttatcaaattaatcacatagcttttatacagaaactcttcctgtgtgagctgttaaggtgccaaattggctgtcatttgtattcatgacacataccataaagcatctgctaatgctttaatggattgattcaattaagacctgagtgacactatttgtaaatataactagttgtgaagcacacatacctttattttgggaatttatgagaaaatatagaaaaccacagatcagggattcatatatgtagctcaaaaattcccaaaagtttactgttagagttggcaatttcctatcactatttcagtgtcagaacaaactgaaaataatggctcgtgtttatgttgaagataaatagcaccattattgggggaagttattcaaaagcaggcttttgagcaccatagtctaaatgccaataaaaataattcatacatagaaatgtcattggtcctgaatttgaagaaagtgagcaacagtagttaaatgtgggtgcatataaccaaattccccttcatcaagaatggaggagaagagagaagaatgaaatcctgaagattcatcccagccgcaactcaggatccaacacaactttaactgggaggaatacattgtttgatcatttttaaaacatctgtgaatgagtgattccggaggcctgtgaattgtgtggggagcttgctttgatggcactgtgttaataaaagttgtagggactgtgcacctaagaggctaagaggtcccactcatccgccctgtgaaccagctgtaaagaaatgtagttaagaaatgcaaagaaatgtgttatcttggcacttgggtttgattttcctttttttaaagcactgcaaaacttctttaggatactaaaacatcctaattgggctgtttttttgttttgttttgtttttcagctaaaggcaaagataatttttttttcagctgaagtttttcttttttgcaactatgacatgaattgagtgataaaatggctctttgaaaagtagatattgtctgtattgtaaatgcttagtcatattcatggcaaagtgttcatttcttgagatggttctttcacaacacacaagaatcaagatggaacgcaaggaaaatctttttgttttgaccgaggtaaccagtttatgtgtgttccaatccatagagaagtgggggaaagggcgagaaaggatcagattgatctgggatcagctttgagcctgagttcagtgaatagcctcatgggcatctcatggaattgatgcatttgctgtggcatatttaaattttgttcaaaagatttgaagcaagaccttgcaaagactcttaacattactgttcagcttgcttagattgtgttaacagttcatttaacaaagatccgttttaactctgaacaaaagcaacccagagcggccattctctattcccatgctggtcaatacgctttcattaccaattggcccttaccaaacttttcttatatatatatttgtattttactatgatagttgagaaatttagcctcttagtcatttttagctgttattgtggaagacctcaaatacaagattagatgcccttgaacatgttttaatgatgtgtgtcatgttactatcaatggtgatttcaatcgcaatattttaaattgatgagaatgatttgtaaacatgaagttactattacgtaaattctgtttgttatagagtttcttcagttgttacccaagtgtcatcctagagaagtcagaagaatcagaatccatcgtattttagagttatgtgaatctacatcataaatgggcattaacattctaaattgcttggtttggagaatgtgttagcagcatagctatattcaactagggagatgctaaatacacagaagtttcaagagccttggaacagaattacaggggaactatatatgtatatgtatattttattaaacacccatctgcactatcagtattgcactaatgtggaatttgaaagactattttgctgatactgtatatatgcgcatcattcctgattagattgttgtaaagacaatctgaaagatctaaggttttaaaataatttggtttgaaaatatacagttgtcttgaaggaattgctgtcatacatgaagttgctccgagctgtctttattctcttcttggtcaaggttaacaattgctaaatgatcgcaaattcacctaaacaatacatttacaaagccatctttacatgcattaaacgagggctacaacaatattgttttacaaatactagcacttttttttctgttatgtacttagtgttagagggtcaaaataatctttctgcttagcatctcttaaaccatacctgcaaatatagcaggattattacatttacagtactttaatacttgtataaactatgcagaaatttttaataaagtgtaatatattttataagctaataagactgaatgggtaaaggtttttagcatgcgttagtatacttgcagatactgaaacattttggtaatctttcttactaaagatgtgaatgtttaatgtaccttctctgtttctactctgtagtccaatgggaattcagtaatgacattttgtcatgtcaaactgtgaacataaatttgtactgtacagtcctcatatactatatacagtatgcaatatatattatatacttgttaataaaaccatcagaatattaaaaaaaatctatgtcgggtgcggagaaagaggtaatgaaatggcaggaattcgatatcagc

SEQ ID NO: 1264 - protein, 345 aa, Homo sapien
MLMFDPVPVKQEAMDPVSVSYPSNYMESMKPNKYGVIYSTPLPEKFFQTPEGLSHGIQMEPVDLTVNKRSSPPSAGNSPSSLKFPSSHRRASPGLSMPSSSPPIKKYSPPSPGVQPFGVPLSMPPVMAAALSRHGIRSPGILPVIQPVVVQPVPFMYTSHLQQPLMVSLSEEMENSSSSMQVPVIESYEKPISQKKIKIEPGIEPQRTDYYPEEMSPPLMNSVSPPQALLQENHPSVIVQPGKRPLPVESPDTQRKRRIHRCDYDGCNKVYTKSSHLKAHRRTHTGEKPYKCTWEGCTWKFARSDELTRHFRKHTGIKPFQCPDCDRSFSRSDHLALHRKRHMLV

SEQ ID NO: 1265 - DNA, 558 bp, Homo sapien
ggcacgaggccttcggccacccccgctgaccatggcagtgtttcatgacgaggtggaaatcgaggacttccaatatgacgaggactcggagacgtatttctatccctgcccatgtggagataacttctccatcaccaaggaagatttggagaatggggaagacgtggcaacgtgtcctagctgctctctcattataaaagtgatttatgacaaagatcagtttgtgtgtggagaaacagtcccagccccttcagccaacaaagaattagttaaatgctgaagaagccttcaggaatccaaatcctgaacatttggaatgagcccagatagaaatatcgaatgcaaagctactggcttcacagagacaaccatttatgatttgctgttctgtaagagtgtggattctttctatcaactgctgatatcatcttcaggaagcaagtccataacatgacatatctggattttgtgcttagaaccttaaattggaagcattcttaattatgcatctaaatttaaaagaagataatttcaaaacagtaaaaaaaaaaaaaaaaa

SEQ ID NO: 1266 - protein, 82 aa, Homo sapien
MAVFHDEVEIEDFQYDEDSETYFYPCPCGDNFSITKEDLENGEDVATCPSCSLIIKVIYDKDQFVCGETVPAPSANKELVKC

SEQ ID NO: 1267 - DNA, 415 bp, Homo sapien
ggcacgaggccagatactactggccatcaagggacagaagaaaaaggcgctcattgtggggcactgcatgcctggcccccgaatgacccccagattcgactccaacaacgtggtcctcattgaggacaacgggaaccctgtggggacacgaattaagacacccatccccaccagcctgcgcaagcgggaaggcgagtattccaaggtgctggccattgctcagaactttgtgtgagttgagcccaggcctctggttgcaggactcgtgaatggagcagttctgagaaccacccttttgctaagggagcttgggagccacatggctgctcccttcacactgggtaacagtgtagtatcctgtgagagaataaatgtattcatttaaaaaaaaaaaaaaaaaaaaaaaaaaaaaaaa

SEQ ID NO: 1268 - DNA, 1664 bp, Homo sapien
tcatggccggctcctaccctgaaggtgcacctgcaatcctcgccgataagaggcagcagttcggaagccggttcctgagcgatccggcgcgggtcttccaccacaatgcctgttgattatgagatcaatgcccacaaatactggaatgacttctacaaaatccacgaaaatgggtttttcaaggatagacattggctttttaccgaattccctgagctggcacctagccaaaatcaaaatcatttgaaggattggttcttggagaacaagagtgaagtatgtgaatgtagaaacaatgaggatggacctggtttaataatggaagaacagcacaagtgttcttcgaagagccttgaacataaaacacagacacctcctgtggaggagaatgtaactcagaaaattagtgacctggaaatttgtgctgatgagtttcctggatcctcagccacctaccgaatactggaggttggctgtggtgtgggaaacacagtctttccaattttacaaacgaacaatgacccaggactctttgtttattgctgtgatttttcttccacagctatagaactggtccagacaaattcagaatatgatccttctcggtgttttgcctttgttcacgacctgtgtgatgaagagaagagttacccagtgcccaagggcagtcttgatattatcattctcatatttgttctttcagcaattgttccagacaagatgcagaaggctatcaacaggctgagcaggcttctgaaacctggggggatggtacttctgcgagattacggccgctatgacatggctcagcttcggtttaaaaaaggtcagtgtctatctggaaatttctatgtgagaggtgatggaaccagagtttacttcttcacacaagaggaactggacacgcttttcaccactgctggactggaaaaagttcagaacctggtggaccgccgactgcaggtgaaccgagggaagcaactgacaatgtaccgggtttggattcagtgcaaatactgcaagccccttctgtccagcaccagctaagaggcacctgctgccaacacgatgcaagcccgttgtgtttccgagctttttttaaaaaaaaatttgtagcaccgggcatggtgcatgcctgtaatcccagccactcaggaggctgaggcagggaggatccattgagcccaggagtccagcctgggcaaaatagcgagagaccctgaatctgaaagtaatgataaaataaaaagaatataaatgaggtctcgttgatgctggacaattcaagaattcagacttgaaccttaaacctaggaaaagttactttgtatcaggattctaacaattatgcttcatatttgtgaagtcctttaaaacataattttctcaagttctttctttgagacctcaatctgtcttagcattttgtaactaataactgaaattttattcaaaggaattgtaaaccttaaaccaccaatttatttccatgtgaaaaagtgttatatatgacaagtgttttttgattgtaattgcgttaaatcttttgagagtgtaaatgccgggctaggcaattgcagttaatacatacaggggttagtgaagggcttattaagttgtaggggaagcaagctgggaagaatcagatcagatattttcctgac

SEQ ID NO: 1269 - protein, 313 aa, Homo sapien
MPVDYEINAHKYWNDFYKIHENGFFKDRHWLFTEFPELAPSQNQNHLKDWFLENKSEVCECRNNEDGPGLIMEEQHKCSSKSLEHKTQTPPVEENVTQKISDLEICADEFPGSSATYRILEVGCGVGNTVFPILQTNNDPGLFVYCCDFSSTAIELVQTNSEYDPSRCFAFVHDLCDEEKSYPVPKGSLDIIILIFVLSAIVPDKMQKAINRLSRLLKPGGMVLLRDYGRYDMAQLRFKKGQCLSGNFYVRGDGTRVYFFTQEELDTLFTTAGLEKVQNLVDRRLQVNRGKQLTMYRVWIQCKYCKPLLSSTS

SEQ ID NO: 1270 - DNA, 2156 bp, Homo sapien
gcgcggacctttcaacaagggctttattaattctcacgctgcggccctggaaagcgatggaggtggcggctaattgctccctacgggtgaagagacctctgttggatccccgcttcgagggttacaagctctctcttgagccgctgccttgttaccagctggagcttgacgcagctgtggcagaggtaaaacttcgagatgatcaatatacactggaacacatgcatgcttttggaatgtataattacctgcactgtgattcatggtatcaagacagtgtctactatattgatacccttggaagaattatgaatttaacagtaatgctggacactgccttaggaaaaccacgagaggtgtttcgacttcctacagatttgacagcatgtgacaaccgtctttgtgcatctatccatttctcatcttctacctgggttaccttgtcagatggaactggaagattgtatgtcattggaacaggtgaacgtggaaatagcgcttctgaaaaatgggagattatgtttaatgaagaacttggggatccttttattataattcacagtatctcactgctaaatgctgaagaacattctatagctaccctacttcttcgaatagagaaagaggaattggatatgaaaggaagtggtttctatgtttctctggagtgggtcactatcagtaagaaaaatcaagataataaaaaatatgaaattattaagcgtgatattctccgtggaaagtcagtgccacattatgctgctattgagcctgatggaaatggtctaatgattgtatcctacaagtctttcacatttgttcaggctggtcaagatcttgaagaaaatatggatgaagacatatcagagaaaatcaaagaacctctgtattactggcaacagactgaagatgatttgacagtaaccatacggcttccagaagacagtactaaggaggacattcaaatacagtttttgcctgatcacatcaacattgtactgaaggatcaccagtttttagaaggaaaactctattcatctattgatcatgaaagcagtacatggataattaaagagagtaatagcttggagatttccttgattaagaagaatgaaggactgacctggccagagctagtaattggagataaacaaggggaacttataagagattcagcccagtgtgctgcaatagctgaacgtttgatgcatttgacctctgaagaactgaatccaaatccagataaagaaaaaccaccttgcaatgctcaagagttagaagaatgtgatattttctttgaagagagctccagtttatgcagatttgatggcaatacattaaaaactactcatgtggtgaatcttggaagcaaccagtaccttttctctgtcatagtggatcctaaagaaatgccctgcttctgtttgcgccatgatgttgatgccctactctggcaaccacactccagcaaacaagatgatatgtgggagcacatcgcaactttcaatgctttaggctatgtccaagcatcaaagagagacaaaaaattttttgcctgtgctccaaattactcgtatgcagccctttgtgagtgccttcgtcgagtattcatctatcgtcagcctgctcccatgtccactgtactttacaacagaaaggaaggcaggcaagtaggacaggttgctaagcagcaagtagcaagcctagaaaccaatgatcctattttaggatttcaggcaacaaatgagagattatttgttcttactaccaaaaacctctttttaataaaagtaaatacagagaattaattattctaacatattggcctctttgtactggaaaagtattcagtggtacctggaggtctggacagttatactgtaacctcttaagttttaatgtgctaaatatatcttgtatgattttttattttttaataacattggaaatatattcaagagattatgattctgtaaagctgtggaatgaagctgcagatttagagaacattggcttctgaaaaaaaaaaagagtgaagatagtactagcaagtatacttattttttaaaacaggctagaatctcatgttttatatgaaagatgtacaattcagtgtttaaaaataaaaatatttattgtgtaaaaaaaaaaaaaaa

SEQ ID NO: 1271 - protein, 601 aa, Homo sapien [sequence omitted]

SEQ ID NO: 1272 - DNA, 6055 bp, Homo sapien
gggtggcggggggttgcaagtgggaagcctgctgttcagctgcccgggctctccgcctccccccaccctgtattgaggctgggtctggggaacctgtgctcagcattccaccccctggagcttgggcttggtcttccctgcgggtccctgcgctgacattcaggcggggagccaggaggcctgggcgcctccagagcccgccgggggagccgggcgagggttctgggctctgacggcggggtcgcagggtcgcccgcctcctggacacgtctgtaggcctagggaagcctgccggcccgggaggtacagagtaggagaagccagatcccagggcggacaacgagaagtcgtcaggctaagaaatggcatttcaaaaggcagtgaaagggacgattcttgttggaggaggtgctcttgcaactgttttaggactttctcagtttgctcattacagaaggaaacaaatgaacctggcctatgttaaagcagcagactgcatttcagaaccagttaacagggagcctccttccagagaagctcagctactgactttgcaaaacacatctgaatttgatatccttgttattggaggaggagcaacaggaagtggctgtgcgctagatgctgtcaccagaggactaaaaacagcccttgtagaaagagatgatttctcatcagggaccagcagcagaagcactaaattgatccatggtggtgtgagatatctgcagaaggccatcatgaagttggatattgagcagtataggatggtaaaagaagcccttcatgagcgtgccaacctgctagaaattgctccccatttatcagctccattgcctataatgcttccagtttacaagtggtggcagttaccttactactgggtaggaatcaagctgtatgatttggttgcaggaagcaattgcctaaaaagcagttatgtcctcagcaaatcaagagcccttgaacatttcccaatgctccagaaggacaaactggtaggagcaattgtctactatgacggacaacataacgatgcacggatgaaccttgccattgctctgactgctgccaggtatggggctgccacagccaattacatggaggtagtgagcttgctcaagaagacagacccccagacagggaaagtgcatgtgagcggcgcacggtgcaaggatgtcctcacagggcaggaatttgacgtgagagccaaatgtgttatcaatgccacgggacctttcacggactctgtgcgcaaaatggatgataaagacgcagcagctatctgccagccaagtgctggtgtccatattgtgatgcctggttattacagcccagagagcatgggacttcttgacccagcgaccagtgatgggcgagttattttcttcttaccctggcaaaagatgacgatcgctggcactactgatactccaactgatgttacacaccatccaattccttcagaagaagatatcaacttcattttgaatgaagtgcgtaattacctgagttgtgatgttgaagtgagaagaggggatgtcctggcagcatggagtggaatccgtcctcttgttacagaccccaaatctgcagatactcagtctatctcccgaaatcatgttgttgatatcagtgagagtggccttattactatagcaggtggaaagtggacaacttatcggtctatggcagaagataccataaatgctgctgtcaaaactcataatttaaaagcaggaccaagtagaacagttgggcttttccttcaagggggtaaagattggagccccacactctacattaggcttgtgcaggattatggacttgaaagcgaggtggcacagcatcttgccgccacctatggtgataaggcctttgaggtggccaaaatggcaagtgtgactggcaaaaggtggcctattgttggagtacgtcttgtgtcagaatttccatatattgaagcagaggtgaaatatgggattaaggagtatgcctgcactgctgtggatatgatttcacgtcgtactcgcctggcctttctaaatgtccaggcagcagaggaagccctacccaggattgttgaactgatgggcagggaactgaattgggatgattataagaagcaggaacaacttgaaacagccaggaagtttctatattatgaaatgggctataaatctcgatcagaacagttaacagatcgctctgaaattagcctactgccttcagacattgacaggtataagaagagatttcataagtttgatgcagaccagaaaggctttattaccattgttgatgttcagcgtgtattagagagtatcaatgtccaaatggatgaaaatacactccatgaaattctaaatgaagttgatttgaataaaaatggacaggttgaactcaatgaatttttgcagctgatgagtgctattcaaaaaggaagggtatctggaagccggcttgctatactaatgaaaactgcagaagagaacctcgacagaagagttccaattccagtggaccgtagttgtggaggattgtgagtctgggcagtaaatccacagccaacaaacatagaaacgacaaatcaccatgtaacaaccagagatgactgaaaccactctgaaataatgaatgtggatagctgccttttttaacactagaaaacattccaaaactttaaggtgttggtgtatttgccagctttatttgctgtactttatttgtatttgccattcagtctagcttttaagtatatttttttctttttctcattttcaatgcacattagttttgcatctgttttgtgacctgttagatgtgacacattctctttttgtttattcccttattctaaatgagttctaaaaacataatattttggcaaaaattgaaaaaagctggagacattttgtgacatgcatacagatagcatgtgttattaaaaagagttgcctattgaaatgatcgtgtttctggagaaattaagcttatagacagcatgtgttattaaaaagagttacctattgaaatgatagtgtttctggagatttctcagccccatcttcctccagcttgtctaccttcctcatgcaaacaatattccacatttttatatctagagcatgactggctaactggagagggaaggaaaagtttagatctggttactggagcaagtctcaaagagaaactctgaaagcttccagaatcacaggtataagataaggatagcattgacatttgctgggagttacagtgatagtttcatctcagcagttcatttttttcttcagtcactgctggttttctttgactattatagttgccaggaagatccttgctcttcttactttaaaaccagcatttaagtggcaatttggatgtaataggatgagaccaaatttatctaattattacagtagtaatacatttaagagttaaaaatgtgtttttatatatccacatatgataacaaaagattcaattcccaagcctaaattttgaagcatgtggtattgtcaaatctagcttaccatcttttttgggggtacttgcaaccatagtaaaggaagatggaatagactttagttaactttaattataattatatgttaaataaggcacataaccagtttccaaggtcatcatggttgcttaaagtctttccccttctgtactccatggaaatattctcagtaaaccaaaaacaaaaatggaaaaataatcaccaacccccatcccgacacacacacacagtccaaagcaaaagtcagtgtgtattgaatttaacaagtaatgcagtttgggatgcttttgctacattttggtggcattttaactagttatctgaatatttattaatcgtacttcctcttgtaaagttaactacttacttttttgttgttgtttttttaacatcaggttctgtatctaataggagatgtaacactttatttcatggcaggtttttattgcagagacttgaagtcttagttttttaaactggcacataaaacactttttgctgttatttttatttatgtcaatactgcagagtatctttatgccttattcaagtggattctgagcctgtatgtcacaatgtaaacactggaggttcactcacctacgcactcacccaccacctctgaaagaaacagaaactgcagagaaagacagcatcttagctcattttgtttttaaatgaggttttagacgcttgccacttcctaagggaaatcctaaaacagagcaagtgatgctcccaggtatcactgtgaacttttttctttcaaagtgtgaatttttacactggctttttcatttttttaaagtaattgaagcttgtggctttacaacttagtgttttttgctatccagataacaagtttcattgtttagaacccagtgacacttaataggtagataaattgtcctttaaaatatcccagatgatatacacaatatggtacatttgtgctctctctctctgtttttctctctttctctttctagttagatcaagataacgatgacttgtaccctccctgattctgttacagtagggcccgggcagatctgtgtttgttaaacaggccttgtttgtgcatgctttgctatgaatgaagttcctttaaggacaaagaaaagcacacttttcttcttttgagcatatctgcttttactttaaatctgctaatttctaaaatgtagagtccttcaccaatcccagagactcaatttggaaatgaactgatttcaagccgttactgtcaataaagcaccccagcattttgtataagctcttaattaaacctgtacagcttctttacctgatttaagaaagggagacaagcaataggggggaataagcttcttcaaaattcattccaagcacaaaagaaattttttccctttgcatataaacttgacatcagttgattctgttggggtcggggtgggtatgcagggattgccttttattatcaagtgatttatttcaagagcctttgaggggattcaggtgaaggaacccccatctgtgctggagagttggatactcctttaaatagcccccaccacagtcataacaataatgataatgctggattatttgttaagccaaggttgtctgcctcatatccatcatgctgtttgcaatattcttgctttcaatcaatttatactgagtgtaactttaggatttctgctattaaatgcatgctctctatcctgcttcagtttctggctttgctttgtctgtttcaaaatatgtagcttcctcttttgtacaacaaaaaactcattctcacttttactaaatatactgtaggagtcatcattgatgttatttttctcttatgtatctgtaaagatttttggcatatgaatgtaatattaaagtcaatgatgctataacttgcgatgtttgcatcatgtcaacctttttgaaggagtgaaaaagccctactatgtttttaaatagcaagtgtaagctcagtgctagagtggatatacacaccgcatgttttcatatgtggcacttttatgtatcatgttgggttattgttctagactggactgttaaatactatgtttgaggctgggttgtcatttttataactgtcttggtgttttatggccattatttattacttttgatacacagaatgagctgcatgcatttatagagcaataagaggatgtatttaatgtgccttgtttttaactgaataagaactggaagcatgaatcaataaaactgattaaaatggtctatttgctagcattttgatgttacttgcagtcagataactttgattactgttgaagtttaaaaaaagtttgaaaatatttttacaaactgtgtttttgatgacacaaaagtgaaatatctacagagatagatgtaattttataagactgccagaattatttgtattaatttgttgctgtagcctttagggcatgacttctgtatttgtgcaatcctattctacaattacattcatcctattacaactcaaagaaaaacaaaaagtcgacgcgg

SEQ ID NO: 1273 - protein, 727 aa, Homo sapien
MAFQKAVKGTILVGGGALATVLGLSQFAHYRRKQMNLAYVKAADCISEPVNREPPSREAQLLTLQNTSEFDILVIGGGATGSGCALDAVTRGLKTALVERDDFSSGTSSRSTKLIHGGVRYLQKAIMKLDIEQYRMVKEALHERANLLEIAPHLSAPLPIMLPVYKWWQLPYYWVGIKLYDLVAGSNCLKSSYVLSKSRALEHFPMLQKDKLVGAIVYYDGQHNDARMNLAIALTAARYGAATANYMEVVSLLKKTDPQTGKVHVSGARCKDVLTGQEFDVRAKCVINATGPFTDSVRKMDDKDAAAICQPSAGVHIVMPGYYSPESMGLLDPATSDGRVIFFLPWQKMTIAGTTDTPTDVTHHPIPSEEDINFILNEVRNYLSCDVEVRRGDVLAAWSGIRPLVTDPKSADTQSISRNHVVDISESGLITIAGGKWTTYRSMAEDTINAAVKTHNLKAGPSRTVGLFLQGGKDWSPTLYIRLVQDYGLESEVAQHLAATYGDKAFEVAKMASVTGKRWPIVGVRLVSEFPYIEAEVKYGIKEYACTAVDMISRRTRLAFLNVQAAEEALPRIVELMGRELNWDDYKKQEQLETARKFLYYEMGYKSRSEQLTDRSEISLLPSDIDRYKKRFHKFDADQKGFITIVDVQRVLESINVQMDENTLHEILNEVDLNKNGQVELNEFLQLMSAIQKGRVSGSRLAILMKTAEENLDRRVPIPVDRSCGGL

SEQ ID NO: 1274 - DNA, 655 bp, Homo sapien
  Unsure 567: Unknown base
ttttttttatcattgacaatgtttattatcaagaaactttaggttttttaaaagaatgctcgttttagaatacaccaagaggacactctgtgacaggacatatacaaacaaggataattaaaatattaaatactatctaaattaaaagaccataattcaaattgctaattataatatttgtgtcggtagaaataactatagttccccttcatgaaattcacccccacgttctcatgaagactatgacgtctcaccacaatttcagttatttaatttacaataatcaatgctgagttttctgtgctgaagcatgcactgttacagaaagcacaaaatcctatttacagggatttttagttttctttaaaatgtatctcaagcatcttttaaagtgcgagctacaaataggttgtatccttaatgaaaaaggcttctttctaaaagaagtatgagatagctatccaatactgcaggaacagttatataactaaccgaaggaaccagcagcactctgctaactctgttttagtgtagcaacctccttcttggtgttctactaccagccanacatgtactccattgctttggataccagactttcatctttttttggcgtttgtctgtcagaaataccctgataatcactagtagaggc

SEQ ID NO: 1275 - DNA, 5954 bp, Homo sapien
  Unsure 3543-3566: Unknown base
  Unsure 5007-5030: Unknown base
cggccgccggccgccgagcgcgggagggcaggcaggggcaggagccggagggcccggggcgcggcgcggcatgtagctgcgggctcccgcgtcgcgtgaggctgtcggcccggggccccgccatggctgggatggacagtggcaacctgaagaccgcgaggctgtggcgggacgccgccctgcgtgccaggaagctgcggagcaacctgcgccagctcacgcttaccgccgccggggcctgccccggggccggggccgacgcgctcgagtcccccgcctccccccagctcgtgctgccggccaacctcggggacattgaggcactgaacctggggaacaacggcctggaggaggtacccgaggggctggggtcggcgctgggcagcctgcgcgtcctggtcctgcgcaggaaccgcttcgcccggctgcccccggcggtggccgagctcggccaccacctcaccgagctggacgtgagccacaaccggctgaccgccctgggcgcggaggtggtgagtgctctgagggagctgcggaagctcaacctcagccacaaccagctgcccgccctgcccgcccagctgggcgctctcgctcacctggaggagctggatgtcagctttaaccggctggcgcacctgcctgactccctctcctgcctctcccgcctgcgcaccctggacgtggatcacaaccagctcactgccttcccccggcagctgctgcagctggtggccctggaggagctggacgtgtccagcaaccggctgcggggcctgcctgaggatatcagtgccctgcgtgccctcaagatcctctggctgagtggggccgagcttggcacgctgcccgccggcttctgcgagctggccagtttggagagcctcatgctagacaacaacgggctgcaggctctgcccgcccagttcagctgcctgcagcggctcaaaatgctcaacctgtcctccaacctcttcgaggagttccctgccgcgctgctgcccttggctggtctggaggagctctaccttagtcgcaaccagctcacctcggtgccatccgcttatctcgggcctgggccggctttctcaccttgtggctggataataaccgcatccgctacctgccggactccatcgtggagctgaccggcctggaggagctcgtgctgcaggggaaccagatcgcggtgctgcccgaccactttggccagctctcccgggtgggtttgtggaagatcaaagacaacccactgatccagcccccctacgaggtctgcatgaaggggatcccctacatcgcagcctaccagaaggaactggctcattcccagccggcggtgcagccccggctcaagctgctcctgatggggcataaggctgcaggaaagactttgctgcgccactgcctcaccgaggagagagtggagggatgcccaggaggaggggacaaggagaagtgctacccaccgtcacctccccctgtgagcaagggcatcgaggtgaccagctggacggccgatgcctcccggggcctgcggttcatcgtgtatgacttagctggggatgaaagttatgaggtgatccagcccttcttcctgtccccaggggccctatacgtgctggtggtcaacttggccacctatgagcctcgccactttcctaccaccgtgggctccttcttgcatcgggtcggggcgagagtgccccacgcggtggtgtgcatcgtgggcacccacgcagacctgtgcggagagcgtgagctggaggagaaatgtctggacattcaccgccagatcgccctgcaggagaagcacgacgcggagggactgagccgcttggccaaggtggtggacgaggcactggcccgggacttcgagctgcgctctgccagcccccacgcagcctactatggcgtttcggacaagaaccttcgacggcgcaaggcccattttcaatacctgctcaaccaccggctgcagatcctctcccccgtgttgcctgttagctgcagggacccgcgccacttacgacgccttcgggacaagttgctgtcagttgctgagcaccgagagatcttccccaacttacacagagtactgcctcgatcctggcaggtgctggaggaactgcatttccagccacctcaggcccagcgactgtggctaagctggtgggactcggcgcgcttgggcctgcaggcgggtctgaccgaggaccgactgcagagtgccctctcctacctgcatgagagcggcaagctactctactttgaggacagtccggctctcaaggagcacgtcttccacaacctcacccgcctcatcgacatcctcaatgtcttcttccagagggatccctctttgctgctgcataagctgctcctagggaccagtggagagggcaaggcggagggggaaagctccccgcccatggcgcggtccacccccagccaggaactgctccgggccacccagctccatcagtatgtggagggctttctgttgcatgggctcttgccagctcatgtcattcggttgctgcttaagcctcatgtccaggcccagcaggacttgcagctgttgctggagctgctggagaagatgggactctgttactgcctcaataaacccaagggcaagcctttgaatgggtccacagcttggtacaagttcccatgctatgtgcagaacgaggtgccccatgcagaagcctggattaatgggaccaacctagctgggcagtcttttgtggctgagcagttgcagattgaatatagctttccttttacttttccacctgggttgtttgcacgctacagtgtccagatcaacagccatgtggtgcacaggtcggatggtaaatttcagatctttgcctatagagggaaagttcctgtggttgtgagttacagacctgccaggggagtcctgcagccagacaccctgtccattgctagccatgcatcattaccaaatatatggaccgcatggcaagccataacccccttggtggaggaactgaatgtcctacttcaggaatggcctggactgcactacaccgtgcacattctctgttctaagtgccttaagagaggatcgcccaatccacatgcttttccaggggagttgctgagtcagcccagaccggaaggagtggcagagatcatttgccccaagaacggcagcgagcgagtaaatgttgccttggtttacccacccacgccaactgtgatcagcccctgttccaagaagaatgttggtgaaaagcacagaaaccagtgacgtttgtggctgtggaatttccatggagaaaagagagcatctgaacacctggaccatcttttgcacctggcagaccctctgcactcaccccagcgtgttctgtgaacttgagtgacaacgcgtgcttgcagggtgctttttggatgactggggaagaggtggggagggggtggtggggggaagcatggacgagaacatggagcaaatgttttacaacctgaacctcagaactgtgatcctccaaggagcgcgctacttgnnnnnnnnnnnnnnnnnnnnnnnngtcgaatggcttctcagggattttgttttccgtgcacatataagccatagttacagtacaggtggcagtatttagagcactcagatttcagttctgttaaatgtgaaagagggatcgactgacgttcattgctgttccataactagtgtaaaatatgtatatgtttatctttatttttataatatgcaaatacatttaaatttatacagtttgaagcttctagcgttagttcacactgggtgcaatattctgcatgagaactgtgccaagatggggctgatttcttattttagtataagacttttttgttttttctttattctttaatcctcttcacattaaaaaaaaaaaatctctctgttagcccatggattaagtgttggttcatagagattgccaataatcagaaagaaccttaaatgtgcatttaagacagtgtcccttcccttcttttcaatgaaggtccctgcctatataaatcatctggcacgctggtgggaaatcctttgctcttccaacgtgttattagtgctgggcagagatggggcacactcaggggccaaagaggacaaaaagtccatgcaaaacttgagtcttttaatggcttaagataatcaggagtcagttctgaatcttacaaagtgctctgcttaataagtaccttacttagcagagcactttgcaaacatattacttattagcagagctctttgtagaccttccacatctggctgtcagatcttaaggttgtgaatttaggctccagttacattcactggagagcataatcccacacgggttatttataaatacagagcctctgattggacggtctcctgccaagaactagtaatacccttgttttaaaatcttcacaaggtaaaacttaaaaagccaaccaaacaaattgctctccattctacttttaattgggccaaacagcatatgctacagtagtaacatgtttttcggagagtgtaaaaaactctgtttacatttgcctcctccgtgggttgatcgaaaatgtataaaactgactgcttctcgccagcctcagacaagaagagtgagttgctggtactcgctactcttttacttcttttgtaaagtattgactcttggaaggctacagtatacaaagtctcaacatgttttttaaaagaaataaggagcaagcgactgccctgctagaaatcacaaaccgatttttgtagaatattttgtgccccaggcattaatttcactgactccagaacctgcagttcagagaatgatttcttatgatgataaaaatcgaatgggatcagacgatgtttgcatttttttaatacttgaataggacacctcaagtttgagatttcattttcttttagaacacagtcacaagattaatctggtgaatccttttgtcacagttctcgtgtgtgtgtgcgcgtctccnnnnnnnnnnnnnnnnnnnnnnnnaaaactgaatggtcacatttaattgctttttggaccattgaatagttgggaagtaagaattttttaattggcatgagacggttcctcaactgttaaattaaccaactttgacctgtctttagaaaaaggcttatttgtatgattttgggctaactccccggggaccatattaaatgacaaaaatgctcctttgggtgacacaccctacaaagtatttgctgttacgaacataaacgcccacattcttaatatctaatatttttgaccagtgatgttttatgctgtcatctgaaccctagagaagcagtgtcagaggaaaccttggtgtcacatgtgtcttagcaaaagggttaccatgatcgagggtcatgtgaccaaaagatgctccagagaagcttgagaatttgtttcaagttgggaggagggttggagatacaaaaatcactctgctctacaggactcttcagctgtctatgcaagaaattccgttttctctttcagcacctggaaagacacagcagcccaccgaggcgataggtgattcactaagcacaagaggaatgttttctaagcaaggcgtcccttgcctctcaaacaaatgccctccaagtttgttagggtttctattcctgcaacttgtagtatcaaaaccacttcctggaattgtcaaagcactgccaaaataaatgtttttcccccttctaagaaaaaaaaaatgacagtgctcatatttgacacttgtgtattggactctcttttgaatgaataaaaaggaaaaggggtttggtgtaattcctgatggggtgcgtgttgtttttcatgccatggtttgtgaattttaattgtggtttcccatttcgttgttgtaactgggcagaaattaaaaaagaaaaatcaataaaaatacaaagaaatggttaaaaa

SEQ ID NO: 1276 - protein, 1093 aa, Homo sapien
AAGRRAREGRQGQEPEGPGRGAACSCGLPRRVRLSARGPAMAGMDSGNLKTARLWRDAALRARKLRSNLRQLTLTAAGACPGAGADALESPASPQLVLPANLGDIEALNLGNNGLEEVPEGLGSALGSLRVLVLRRNRFARLPPAVAELGHHLTELDVSHNRLTALGAEVVSALRELRKLNLSHNQLPALPAQLGALAHLEELDVSFNRLAHLPDSLSCLSRLRTLDVDHNQLTAFPRQLLQLVALEELDVSSNRLRGLPEDISALRALKILWLSGAELGTLPAGFCELASLESLMLDNNGLQALPAQFSCLQRLKMLNLSSNLFEEFPAALLPLAGLEELYLSSQPAHLGAIRLSRAWAGFLTLWLDNNRIRYLPDSIVELTGLEELVLQGNQIAVLPDHFGQLSRVGLWKIKDNPLIQPPYEVCMKGIPYIAAYQKELAHSQPAVQPRLKLLLMGHKAAGKTLLRHCLTEERVEGCPGGGDKEKCYPPSPPPVSKGIEVTSWTADASRGLRFIVYDLAGDESYEVIQPFFLSPGALYVLVVNLATYEPRHFPTTVGSFLHRVGARVPHAVVCIVGTHADLCGERELEEKCLDIHRQIALQEKHDAEGLSRLAKVVDEALARDFELRSASPHAAYYGVSDKNLRRRKAHFQYLLNHRLQILSPVLPVSCRDPRHLRRLRDKLLSVAEHREIFPNLHRVLPRSWQVLEELHFQPPQAQRLWLSWWDSARLGLQAGLTEDRLQSALSYLHESGKLLYFEDSPALKEHVFHNLTRLIDILNVFFQRDPSLLLHKLLLGTSGEGKAEGESSPPMARSTPSQELLRATQLHQYVEGFLLHGLLPAHVIRLLLKPHVQAQQDLQLLLELLEKMGLCYCLNKPKGKPLNGSTAWYKFPCYVQNEVPHAEAWINGTNLAGQSFVAEQLQIEYSFPFTFPPGLFARYSVQINSHVVHRSDGKFQIFAYRGKVPVVVSYRPARGVLQPDTLSIASHASLPNIWTAWQAITPLVEELNVLLQEWPGLHYTVHILCSKCLKRGSPNPHAFPGELLSQPRPEGVAEIICPKNGSERVNVALVYPPTPTVISPCSKKNVGEKHRNQ

SEQ ID NO: 1277 - DNA, 3164 bp, Homo sapien
gcagccccggcggccgaacgcccgcggcgcgggactccatcgtcagagaagtcattcagaattcaaaagaagttctaagtttattgcaagaaaaaaaccctgccttcaagccggttcttgcaattatccaggcaggtgacgacaacttgatgcaggaaatcaaccagaatttggctgaggaggctggtctgaacatcactcacatttgcctccctccagatagcagtgaagccgagattatagatgaaatcttaaagatcaatgaagataccagagtacatggccttgcccttcagatctctgagaacttgtttagcaacaaagtcctcaatgccttgaaaccagaaaaagatgtggatggagtaacagacataaacctggggaagctggtgcgaggggatgcccatgaatgttttgtttcacctgttgccaaagctgtaattgaacttcttgaaaaatcaggtgtcaacctagatggaaagaagattttggtagtgggggcccatgggtctttggaagctgctctacaatgcctgttccagagaaaagggtccatgacaatgagcatccagtggaaaacacgccagcttcaaagcaagcttcacgaggctgacattgtggtcctaggctcacctaagccagaagagattccccttacttggatacaaccaggaactactgttctcaactgctcccatgacttcctgtcagggaaggttgggtgtggctctccaagaatacattttggtggactcattgaggaagatgatgtgattctccttgctgcagctctgcgaattcagaacatggtcagtagtggaaggagatggcttcgtgaacagcagcacaggcggtggagacttcactgcttgaaacttcagcctctctcccctgtgccaagtgacattgagatttcaagaggacaaactccaaaagctgtggatgtccttgccaaggagattggattgcttgcagatgaaattgaaatctatggcaaaagcaaagccaaagtacgtttgtccgtgctagaaaggttaaaggatcaagcagatggaaaatacgtcttagttgctgggatcacacccacccctcttggagaagggaagagcacagtcaccatcgggcttgtgcaggctctgaccgcacacctgaatgtcaactcctttgcctgcttgaggcagccttcccaaggaccgacgtttggagtgaaaggaggagccgcgggtggtggatatgcccaggtcatccccatggaggagttcaaccttcacttgactggagacatccacgccatcaccgctgccaataacttgctggctgccgccatcgacacgaggattcttcatgaaaacacgcaaacagataaggctctgtataatcggctggttcctttagtgaatggtgtcagagaattttcagaaattcagcttgctcggctaaaaaaactgggaataaataagactgatccgagcacactgacagaagaggaagtgagtaaatttgcccgtctcgacatcgacccatctaccatcacgtggcagagagtattggatacaaatgaccgatttctacgaaaaataaccatcgggcagggaaacacagagaagggccattaccggcaggcgcagtttgacatcgcagtggccagcgagatcatggcggtgctggccctgacggacagcctcgcagacatgaaggcacggctgggaaggatggtggtggccagtgacaaaagcgggcagcctgtgacagcagatgatttgggggtgacaggtgctttgacagttttgatgaaagatgcaataaaaccaaacctgatgcagaccctggaagggacacctgtgttcgtgcatgcgggcccttttgctaacattgctcacggcaactcttcagtgttggctgataaaattgccctgaaactggttggtgaagaaggatttgtagtgaccgaagctggctttggtgctgacatcggaatggagaaattcttcaacatcaagtgccgagcttccggcttggtgcccaacgtggttgtgttagtggcaacggtgcgagctctgaagatgcatggaggcgggccaagtgtaacggctggtgttcctcttaagaaagaatatacagaggagaacatccagctggtggcagacggctgctgtaacctccagaagcaaattcagatcactcagctctttggggttcccgttgtggtggctctgaatgtcttcaagaccgacacccgcgctgagattgacttggtgtgtgagcttgcaaagcgggctggtgcctttgatgcagtcccctgctatcactggtccgttggtggaaaaggatcggtggacttggctcgggctgtgagagaggctgcgagtaaaagaagccgattccagttcctgtatgatgttcaggttccaattgtggacaagataaggaccattgctcaggctgtctatggagccaaagatattgaactctctcctgaggcacaagccaaaatagatcgttacactcaacagggttttggaaatttgcccatctgcatggcaaagacccacctttctctatctcaccaacctgacaaaaaaggtgtgccaagggacttcatcttacctatcagtgacgtccgggccagcataggcgctgggttcatttaccctttggtcggaacgatgagcaccatgccaggactgcccacccggccctgcttttatgacatagatcttgataccgaaacagaacaagttaaaggcttgttctaagtggacaaggctctcacaggacccgatgcagactcctgaaacagactactctttgcctttttgctgcagttggagaagaaactgaatttgaaaaatgtctgttatgcaatgctggagacgtggtgaaataggccaaagatttcttcttcgttcaagatgaattctgttcacagtggagtatggtgttcggcaaaaggacctccaccaagactgaaagaaactaatttatttctgtttctgtggagtttccattatttctactgcttacactttagaatgtttattttatggggactaagggattaggagtgtgaactaaaaggtaacattttccactctcaagttttctactttgtctttgaactgaaaataaacatggatctagaaaaccaaaaaaaaaaaaaaaaa

SEQ ID NO: 1278 - DNA, 3682 bp, Homo sapien
cggggccgctgaatgagatcctcatctgcgggaagtgtggcctgggttaccaccagcagtgccacatccccatagcgggcagtgctgaccagcccctgctcacaccttggttctgccgacgctgcatcttcgcactggctgtgcggaaaggcggcgcgctgaagaagggcgccatcgccaggacgctgcaggccgtgaagatggtgctgtcctaccagcccgaggagctcgagtgggactcgccccatcgcaccaaccagcagcaatgctactgctactgcggcgggcccggagaatggtacctgcggatgctgcaatgttaccggtgcaggcagtggttccacgaggcctgcacccagtgcctcaatgagcccatgatgtttggagaccggttttacctgttcttctgctccgtgtgtaaccagggcccagagtacatcgagaggctgcccctgcgatgggtggatgtggttcacctggccctctataatctgggggtacagagcaagaagaagtactttgactttgaggagattctggcctttgtcaaccaccactgggagctcctgcagcttggcaagctcaccagcaccccagtgacagatcgaggaccacatctcctcaacgctctgaacagttataaaagccggttcctctgcggcaaggagatcaagaagaagaagtgcatcttccgcctgcgcatccgcgtcccacccaacccgccagggaagctgctgcctgacaaaggactgctgccaaatgagaacagcgcctcctctgagctgcgtaagagaggaaagagcaagcctggtttgttgcctcacgaattccagcagcagaaaaggcgagtttatagaagaaaaagatcaaagtttttgctggaagatgctattcccagtagtgacttcacctcagcctggagcaccaaccaccacctggctagcatatttgacttcacgctggatgaaattcaaagtttaaaaagtgccagctcaggccagaccttcttctcagatgtcgactccaccgacgctgccagcacctctggctctgcctccaccagcctctcctatgactccagatggacagtgggcagccgaaagaggaagctggcagccaaggcatacatgcccctgcgggcaaagcggtgggcagctgagctggatggacgctgcccctcggacagcagtgcagagggggcttcagtccccgagcggccagacgaaggcattgacagccacacatttgagagcatcagtgaagatgactcatccctgtcccacctcaagtcatctatcaccaactactttggtgcagctgggcggttggcctgtggggagaagtaccaggtgttggctcggagggtcacacctgagggcaaggttcagtacctggtggagtgggaagggaccaccccttactgactagcccccgggggtgccaggggtcctgaaaaccaaaggaggagcagcagaagccataggctccccagctttctccaggctggggtgggagaaggaagcaggacagagctgcaagtgcctggcagaatgccctgcctgcctgcctgcctgccaggccaaggcctgcgtctctctgctgtaccagctctgttccagggcctcctcaggctcgttacccctgtgcctgtgtctctacacactccacaccccctcaaactctgtttatctgttctctgaccttgtgtcccctgcgctgggacccttcctcctgaggcccaggtctttgtccccagttgtgtgccttgacctctctcgcccctttctgggtgtgttcgcacatcctgtgtgtgcacagctgtccctccactggatccccttcacacgtgacccgtggggcagccagtcctcccagggactacataacaggcacctttgagagagcatgggagaaggtggataagaggatgctgctcagtgcttttctcttccactttcctgccactccccactaccctcggagagaggtggtgggatgggagagagcccctgtgaaagcctgtgaggatctgaagagtaaagggctgggtctgcctcagaaggcaccagcaccagggcccaggtattaaggctgagagtgaaggctgccaatgtcagctttggaggtcccagaagtcttctgttctctggcctcaccccctcagtcgccatagagctgggcctggccttgctggaatggaggcatccttccaaacctgggggacgggggtggggggtggtagtggtgggagggaaaccatgtcttgctaaacctgtttctggtgcctcccatccccagacccaccagacaccacacagcagacaatacacacccactcgcacaagcttccatccacatgtgttgtactttcagctctaggcatgcagacaaccccacacggccacaccaccacatgcccaagtgtacacacacagagccacaccgtccctctgggcctgctggctcctcccttggctttcccttggcccacttccagggcccaggtgctgcaactaaatgtgaaagctcagtggccgctccttctttcagcccatcaaccagcattggtcccatagggaagcacaggggactcaccctctttcatatcccttgccctgccctgaaatggacaatcactttttgggataggttgaaatttttaaagagcctgcatcattcggttccctcaaagggaagcccttgctagtgggggtttgaaagagaatttttggaaccaacattcaaattctgcctcatctggagggaaaccaaaattgggagggggaagaggacccctgatgttttgctgcttccagagatattagaaactgactcacttgattggaaaatggacaaaagtgccttgacgtggagggtgggcaccagatggggaccagccttgccaactgctgctgtggcctccagcttggctggttttgcaggccgccagcaggaaggcgaaggtggtagtacagcaagaggcactggcggggcagcaggcctgcaggagctgtttttccattgctaggcctgacccctctctacctgtgagcgttcagggggtccctgagatagtttagatgccccccccatcttagacctcagctcccacagtgccttttaagggggacctcacctcctgtgcacagcccacccactttcctctgcttccctggcacagcccaggcatagacgagctggcgttggacccagttcttcccccttttcagccccacagctgctgccacaggggccaactagggccaggtggaaggggagctgagaagccaacccctagcccaggggtgctgtgggaactgggatccaatttgtagcttcccgcctggcttcagagagcccagcaaccttctaggcctgctttccagacttctgagatagcctgggatgagcaatcctgttacagtacatctggaccttccctacctgggctctggggaggctgtgggcctggagagggaaaaggagggagggggtgtctgcaccacctgggaagatagcacaaggcctaatgaggtcaccctgactccccaccccagcatttcattcataccagataatagctgcattactgccaactgaccttataaccctctgcaccttcaaaaagattcatggtttttaattgctgcttttaataacatttgtaaagttaaaaaaaaaa

SEQ ID NO: 1279 - protein, 473 aa, Homo sapien
GPLNEILICGKCGLGYHQQCHIPIAGSADQPLLTPWFCRRCIFALAVRKGGALKKGAIARTLQAVKMVLSYQPEELEWDSPHRTNQQQCYCYCGGPGEWYLRMLQCYRCRQWFHEACTQCLNEPMMFGDRFYLFFCSVCNQGPEYIERLPLRWVDVVHLALYNLGVQSKKKYFDFEEILAFVNHHWELLQLGKLTSTPVTDRGPHLLNALNSYKSRFLCGKEIKKKKCIFRLRIRVPPNPPGKLLPDKGLLPNENSASSELRKRGKSKPGLLPHEFQQQKRRVYRRKRSKFLLEDAIPSSDFTSAWSTNHHLASIFDFTLDEIQSLKSASSGQTFFSDVDSTDAASTSGSASTSLSYDSRWTVGSRKRKLAAKAYMPLRAKRWAAELDGRCPSDSSAEGASVPERPDEGIDSHTFESISEDDSSLSHLKSSITNYFGAAGRLACGEKYQVLARRVTPEGKVQYLVEWEGTTPY

SEQ ID NO: 1280 - DNA, 1697 bp, Homo sapien
ctgtttatagataatgtctgcagtttctgtttgagagagataattatgacacttagcattggaaaactaagaagaacgtaagcaggtcagctatcagaagtcttcagactggagagattcctggagggggagtggccctttaatccatcagctgaagccatctggtaggacgctcgttgcagaaatggttagttctgaaatgttgtagctcagcaacatcactgaatgtcacagaattgacaggcacggagctaaaagggcctctagccacccccacaactccgctctacctctgtctccctaacacatgacttggaacaaatacactctaggtacaaagatggctacctgaagtttatgatccctactcatggagctgcttgaggacttcacattttttaaaaagctgctttgggcacccccattcctgaggagttttgtagcttggtttctctttgccacattacgtttgtaagactaacattttataaccataagcagttaggcctttttattttgagaaatttatctgtagcttccttttatttacacttggggactatttttaagtaaccgattgaaatatttttgtttctccattgcaagtgaaatccttgttgctaatcttttgccacatgtaaaattgttcacttgttatcaagcaggtagttcaatatctgtaattcttgagttcttttcaactagcatgatgctaggtgtcactcactgttttttaattgtgggagattgatgcgtcagtgcatgaagtggggggtggtcaccagcatctaactcaaagtgtgattatagctatcttaccacattttttttttctttctcactctgtcacccaggctggagtgcagtggtgtaatctcagctcactgcagcctcgacctcctgggctcaagcgatcctcctacctcagcctcccaaatagctgggaccacaggcgcatgccaccccactaagctaatttttctattttttgcagagacagggttttgccgtgttgcctaggttgttctcaaactcctgagctcaagcctgcctcagcctcccaaagtgctgggattacatgtgtgagccaccatgcctggccgtcactaatcttcaaggttaatatttggaggacccatccagagtccaaaggtggtcttcgagggatagcacgaggtggtctgacaggactaacacttaccagcctctatgcactatataataactgggagcacatgaaaggctccttgctccaacagtcactctgaagattttgccaactcatgaatggaggacacttcagtagtcatctagatccttttataagacagtttggagttattctctctcttctacctacaattagtttgaaaaattggagattttgatttgctgtgatgaaaatcctggatggctgaccaagactggcacttgttccagccattagtgagttgaagccaaagccctttggtgactcactgagtaccatggttctgttctcctctggagatcttgcacgtatctgttttcctcccccatgaactagaaaaccacttactcccagaattcaggtcgtgcttgttagtactatatcaccaagtccattcatttaatgatccaaaactgtaatgttgcactgtattccaaataaagggtaaaaacagaaccaaaggtataactccaaaaaaaaaaaaaaa

SEQ ID NO: 1281 - DNA, 514 bp, Homo sapien
gtcctctctgctctcgcggccgactcgcaagatggcgccgcagaaagacaggaagcccaagaggtcaacctggaggtttaatttggaccttactcatccagtagaagatggaatttttgattctggaaattttgagcaatttctacgggagaaggttaaagtcaatggcaaaactggaaatctcgggaatgttgttcacattgaacgcttcaagaataaaatcacagttgtttctgagaaacagttctctaaaaggtatttgaaataccttaccaagaaataccttaagaagaacaatcttcgtgattggcttcgagtggttgcatctgacaaggagacctacgaacttcgttacttccagattagtcaagatgaagatgaatcagagtcggaggactaggcaaaggctccccttacagggctttgcttattaataaaataaatgaagtatacatgagaaataccaagaaattggcttttagtttatcagtgaataaaaaatattatactcttg

SEQ ID NO: 1282 - protein, 132 aa, Homo sapien
SSLLSRPTRKMAPQKDRKPKRSTWRFNLDLTHPVEDGIFDSGNFEQFLREKVKVNGKTGNLGNVVHIERFKNKITVVSEKQFSKRYLKYLTKKYLKKNNLRDWLRVVASDKETYELRYFQISQDEDESESED

SEQ ID NO: 1283 - DNA, 2859 bp, Homo sapien
ctaactttgagtcaacgctgactacagcaccaggactgctcacttccagcttctgctgacacctgccctcgtttagtctttcttggtggctgcaggttcagtagaaactctatgccaggctttgtctccgggacataggagagtgctggtgctcagtcatgtttgttgaatgagtaataaatggtaaaggttgttgctgccccgagacgcttcaagaggaagcagccccctaaccccagctgggaggaggaggaagaatcctgggctggtcagttggggaaggagctgagcaggccgggccacctgggctgacacagcacgagcaccacgtggatgggatgcctgcagtcagctgcaggagggcctcgtcgggaggccacagggcccctcttttgtcttgaatggagacctccaaggctccaggacataaagggccttggccaagctgttcctggccacctggccacatctccagctgcaccagttctcacctccattccccacggccccagctgtcaggttttagggtggcagagagctccatgcaccccctggccttggcctcttctggggcttagagctccaggacttttgggcctgtgcaccctcagcgtcccctcttacgactccggcgaggacggccaggtgcctggtggactcttgcacgtgctcagccacgagacctcatgtgcgctgtcctgagcccacctgtgtcctcagatgttccaggtcatccagccagagcgtgcgctgtacatccaggccaacaactgcgtggaggccaaggactggatcgacattctcaccaaagtgagccagtgcaaccagaagcgcctcaccgtctaccacccgtccgcctacctgagcggccactggctgtgctgtagggcgccatccgactcggctccgggctgctcgccctgcactggcggcctcccagccaacatccagctggacattgatggggaccgtgagacggagcgtatctactccctcttcaacttgtacatgagcaagctggagaagatgcaggaggcctgtgggagcaaatctgtgtatgacggcccggagcaggaggagtattcgacgttcgtcattgacgacccccaggagacctacaagacgctaaagcaagtcatcgctggggttggggctttggagcaggagcacgcccagtataagagggacaagttcaagaagacgaaatatggaagccaggagcaccccatcggagacaagagcttccagaactacatccggcagcagtccgagacctccactcattccatttaaagtctgcgggacgcgcccagtggcgccagcaagctgcccatgcaaagccgcagcctttgggagggagaagagaaggaagagcgcagagccggcaaagtgagatgcacgccgtcccggcccatagacaagtggcgctggggtttccctctcccagaaccgctgccaccaccgccacgccctccgcagaaagcccacctggccctgtggaacgtgtcgtcatttgattctgtgctttttgctccttgtttgtggggatctggggatcagctgaaggatcaggaagtgtgggctgtgccctagccacaccacagccagcctcagggagccacggcccgtctagtcgactgtgacatgcacctccggccgtgtgtgcgtcagtctcgtgcacgtctgtcttgcgttgcacggtgcgtgtgacgctgggctctgtggctctgtgcccgggaggcctgctggccccgcctcggctttcggcttcatcacattgggaggttcagagcattactctcccactgtgcctgccatccaggcagccatgggaggcggcctccctgttccactttcgaggttcgtttgattcctggctgaggggtcagttttatggctgggaggtgcagaattacacagaagtcccagtctgaggatgtccttggtgcttgggggatacgggttctgtccacagagtcccttggagggaaaggtgtgggctccagcttctccaggcgtctgcggagcccacagttgaagcccacatcgttttgctgttgaatggggtttaaaatcagaattaacatttgccaccccccgtggaagtttgaagattttaaaaatagaaatgtacatttttcaagctgtttttctttatgtttttgaaggaccatttttaattagctctttgatacaaagtaactcagaacgtcaaaacctatacccactaaagggaaggctgccgggaaggcaaatggaacaggaatggagcctgtctcaggaaggccagctgcaggtcctccagaaaatcaaagaagggaagaaactctgagtttgaggtacaggggcttcggggtgcagacgtccctccagggcccatggtcagtattgcacctgtgttatgaacccccagatgctgtgcagggcaggggcgggggctgctgttttattggggaggggagcatcctaaaaatggggtccaggcagacccctccagacctcacactgccgaggaggcctttcccaaagggcgtcctcccgggatgcagacggcaggtgtgtgggaagcgccgtttaaatacacagcacgacgtatccttgtaccgacttctcccggttcttgtttgaaaatactgtagttcaggctcttgatctagatggcagataggaactttcttgtcacaaaaatactggaggaaaatgttgtaaaaatagacttttggacacacagctgttggggctgcactgagctgcaatttttaacatggatttataacttaatgtttctgtttataaaatactaatgatttgcaatgtattttactggccaattaaaacagatgttttattctttctgaa

SEQ ID NO: 1284 - protein, 190 aa, Homo sapien [sequence omitted]

SEQ ID NO: 1285 - DNA, 1835 bp, Homo sapien
gtgcagttgcggctccagggccatggcggaggagcagggccgggaacgggactcggttcccaagccgtcggtgctgttcctccacccagacctgggcgtgggcggcgctgagcggctggtgttggacgcggcgctggcgctgcaggcgcgcgggtgtagcgtgaagatctggacagcgcactacgacccgggccactgtttcgccgagagccgcgagctaccggtgcgctgtgccggggactggctgccgcgaggcctgggctggggcggccgcggcgccgccgtctgcgcctacgtgcgcatggttttcctggcgctctacgtgctgttcctcgccgacgaggagttcgacgtggtagtgtgcgaccaggtgtctgcctgtatcccagtgttcaggctggctagacggcggaagaagatcctattttactgtcacttcccagatctgcttctcaccaagagagattcttttcttaaacgactatacagggccccaattgactggatagaggaatacaccacaggcatggcagactgcatcttagtcaacagccagttcacagctgctgtttttaaggaaacattcaagtccctgtctcacatagaccctgatgtcctctatccatctctaaatgtcaccagctttgactcagttgttcctgaaaagctggatgacctagtccccaaggggaaaaaattcctgctgctctccatcaacagatacgaaaggaagaaaaatctgactttggcactggaagccctagtacagctgcgtggaagattgacatcccaagattgggagagggttcatctgatcgtggcaggtggttatgacgagagagtcctggagaatgtggaacattatcaggaattgaagaaaatggtccaacagtccgaccttggccagtatgtgaccttcttgaggtctttctcagacaaacagaaaatctccctcctccacagctgcacgtgtgtgctttacacaccaagcaatgagcactttggcattgtccctctggaagccatgtacatgcagtgcccagtcattgctgttaattcgggtggacccttggagtccattgaccacagtgtcacagggtttctgtgtgagcctgacccggtgcacttctcagaagcaatagaaaagttcatccgtgaaccttccttaaaagccaccatgggcctggctggaagagccagagtgaaggaaaaattttcccctgaagcatttacagaacagctctaccgatatgttaccaaactgctggtataatcagattgtttttaagatctccattaatgtcatttttatggattgtagacccagttttgaaaccaaaaaagaaacctagaatctaatgcagaagagatcttttaaaaaataaacttgagtcttgaatgtgagccactttcctatataccacacctccctgtccacttttcagaaaaaccatgtcttttatgctataatcattccaaattttgccagtgttaagttacaaatgtggtgtcattccatgttcagcagagtattttaattatattttctcgggattattgctcttctgtctataaattttgaatgatactgtgccttaattggttttcatagtttaagtgtgtatcattatcaaagttgattaatttggcttcatagtataatgagagcagggctattgtagttcccagattcaatccaccgaagtgttcactgtcatctgttagggaatttttgtttgtcctgtctttgcctggatccatagcgagagtgctctgtattttttttaagataatttgtatttttgcacactgagatataataaaaggtgtttatc

SEQ ID NO: 1286 - protein, 416 aa, Homo sapien
MAEEQGRERDSVPKPSVLFLHPDLGVGGAERLVLDAALALQARGCSVKIWTAHYDPGHCFAESRELPVRCAGDWLPRGLGWGGRGAAVCAYVRMVFLALYVLFLADEEFDVVVCDQVSACIPVFRLARRRKKILFYCHFPDLLLTKRDSFLKRLYRAPIDWIEEYTTGMADCILVNSQFTAAVFKETFKSLSHIDPDVLYPSLNVTSFDSVVPEKLDDLVPKGKKFLLLSINRYERKKNLTLALEALVQLRGRLTSQDWERVHLIVAGGYDERVLENVEHYQELKKMVQQSDLGQYVTFLRSFSDKQKISLLHSCTCVLYTPSNEHFGIVPLEAMYMQCPVIAVNSGGPLESIDHSVTGFLCEPDPVHFSEAIEKFIREPSLKATMGLAGRARVKEKFSPEAFTEQLYRYVTKLLV

SEQ ID NO: 1287 - DNA, 2648 bp, Homo sapien
  Unsure 571-602: Unknown base
aagtaagaattataaatctatctcagttaaaagtaggatctttgtttttattcagatattttgaaagtttagaagcattttgtatgctactttggtatttcttaagtatagtcagcaggaaagggtaacctgttttatgcaaaatttttttaatttgtcaaatgtttttagtgtgtctactttctgaaatagtctcaatatcctgtctgtatcctaggcagataactacacaagaacaaaacgctatatagaaaagaaaatatttgaggaaatcttaaattccataagaaagtaattcttgcaagaatgttggctacatatttttttttctgtcctgaataaattacatcattaggtctgttgaagcttttgaagctaccactattctttctgggataaaggctaattactgatttatctgccctcaaaatcccagagttaattctaattgagtactaaattaacagtaagtagttaacacagagaactaaaatttaaccgcattatatcactgtatatatttctcatgatttttgctaattagagcatttacttaaccagtaataaactnnnnnnnnnnnnnnnnnnnnnnnnnnnnnnnngtgtgtgtgtgtatatacttggctctgacacaactctggtgcttaattaggatatgttctattatgtattttgaatgtttatcctgctagtgcgatgaacttttgttggaaaagcagaattagaaggaacagtttttcaatcagtttcatttggtaattacaggaaaaccttgagttgctctaatttaatttttccaattaatacatttagactttaaattgcatccgtaattctcttggctgaaaaacagtggtattttaagacagttttgttatacatgtgacttacttttgactcagcctgagaggaggaaatgtaaagagataagagatttggcccaaagcagcaagagactagtaaccttgagccaggacgaagccaagacaacgtgactcccaagtagcaggagcagaggtcggtcacctgtggcattctgtttcattcccttttaaaattatgagactttataggcagtgtaaaacatcagcaggcagcgatgtgataggatgtgcgaaaaagctggtctgataccatggctataattacagagctttagttcaattaggattttgtaaatgagcaaatgacctttttttccagtgccccttgtaatagttaatatgagtccatgcaatcttgtgatgccattctcctgaaggtgttgatttctggtacccagccagcttagctttggctgctggaagcacagtaggtactgatgattacttcctggaaatcttgacaggcttattgtactgtgtaatggggaaaagttaaagtataatgtttggtgttaataaatgactgatgtgaaaataggaacatgtgtctttaatatcaaatatggctttatttgcagtgaaatctaaattccttattctacagtagtattttcttgccctgtgttgtatattttcctaaatacatttttcctgacagtggctttaggccagttgaacacacttagactgaaagtgtttaacttaaagagatcagtccagaaaccatgataaattagaatctttatctggaattaccaaattaaaatttaaaatcatggtccagaagagaacaaacattcatggttttttttatcctactgctcatttttaggtctgtgtttacatctagtctctactatttgtgaagtatgtcattatttttttcaagttcttctttgacttaactgaaaaataatattccaaattcttaatgtaacatgaaaagagaaatacaatttttgcttaaaagacattttttaaaaagcgttcaattcagtaatcatttctgttaatacaggaagtttttttggcttgccagttatatactgtgggtattttttaaaatgtgctacccttgggttgtctcatatcaccttgcgtaatcatgtattacaaaggttgataattgtcatttctcagatgtctgtatgttacattggcagcagtaaaatgttttaatgttgttaccttttaaataattgtgttgtattaacatgcctcatattttctggggaaacttgaaatatatctaaacaaaaaaggtctgttataaataggaattggcatttcattgttaatgttttttcctcataaaaatagttacaccaaaagtgacatattgtctattacatgggcccaatcagtattaaagtactccccttactcaaaaatattaaaaaataattcatgacacttagtagcattttcattgattgtttcaaaagatcttcataatggtcaaattgtccaattcacaaaagagtgagaaagttgttttcagtactgggaatttttaaaccttagttttaagaccaaaaatatctcttattagcttgaacattttgtgattacttttccctccccggatctagtccttttaaggagtaagtctaaagaatgaggccatgaagtcactatttcctcccacctcagtttgtctcctggtacttagctggcctatcgctttgtgtggcaatacccctgggtcgcttccccactcagccttctgtatctgctgttcacaggacatgccattatgtcttt

SEQ ID NO: 1288 - protein, 45 aa, Homo sapien
MKSLFPPTSVCLLVLSWPIALCGNTPGSLPHSAFCICCSQDMPLC

SEQ ID NO: 1289 - DNA, 3780 bp, Homo sapien
tactggacaaacatttcctccaaggacacagctctctgcctccatgtcaccacctttgaaggactgactgattccctcggctggtgccagtgcctgctcctgccatggggcccgcggggagcctgctgggcagcggacagatgcagatcaccctgtggggaagtctggcagctgtcgccattttcttcgtcatcaccttcctcatcttcccgtgctctagttgtgacagggaaaagaagccgcgacagcatagtggggaccatgagaacctgatgaacgtgccttcagacaaggagatgttcagccgttcagttactagcctggcaacagatgctcctgccagcagtgagcagaatggggcactcaccaatggggacattctttcagaggacagtactctgacctgcatgcagcattacgaggaagtccagacatcggcctcggatctgctggattcccaggacagcacagggaaaccaaaatgtcatcagagtcgggagctgcccagaatccctcccgagagcgcagtggataccatgctcacggcgagaagtgtggacggggaccaggggctggggatggaagggccctatgaagtgctcaaggacagctcctcccaagaaaacatggtggaggactgcttgtatgaaactgtgaaggagatcaaggaggtggctgcagctgcacacctggagaaaggccacagtggcaaggcaaaatctacttctgcctcgaaagagctcccagggccccagactgaaggcaaagctgagtttgctgaatatgcctcggtggacagaaacaaaaaatgtcgtcaaagtgttaatgtagagagtatccttggaaattcatgtgatccagaagaggaggccccaccacctgtccctgttaagcttctggacgagaatgaaaaccttcaggagaaggaagggggagaggcggaagagagtgccacagacacgaccagtgaaactaacaagagatttagctcattgtcatacaagtctcgggaagaagaccccactctcacagaagaagagatctcagctatgtactcatcagtaaataaacctggacagttagtgaataaatcggggcagtcgcttacagttccggagtccacctacacctccattcaaggggacccacagaggtcaccctcctcctgtaatgatctctatgctactgttaaagacttcgaaaaaactccaaacagcacacttccaccagcagggaggcccagcgaggagccagagcctgattatgaagcgatacagactctcaacagagaggaagaaaaggccaccctggggaccaatggccaccacggtctcgtcccaaaggagaacgactacgagagcataagtgacttgcagcaaggcagagatattaccaggctctagcaacccagaagacaaccctgggtagcctgtgatcagtgtctggagacgtttcttctgtggaagagaagaagtgacacaaacctatacttcatatgctgctttagtcacctgaagatggttggagaggccctgtcgactgttctcccagttgttcagtttctgagacagagaggtacggactaggctgcacctgagtgtgcccctgcctgccagatggacaggtacacccaagcacatctccctgctgcaccctcaccacccacaaaagatcccagctgtcagtggtctcatctcattagtgaggaaagccaagctgtatggaaaagctgcactcaccaaggaccacaatgcccccggcctaaagtactgccattcagaaaagcaggtttttcttcctctctttccttttctctgtctgctactgactttaaggctttttcccccttgaaatgtccagattcctgtggttcatcccaaggaaattttcacacaaagcttggcctttgccctcaatataggtgttttaggatggtgacaaaccatggctgctgctttctgcccagctcgccagtcctccccaaagagttgcgcatcagcacctggggatctggaccctgcgggtgaagggatggggagggacgtccctggagtctcttctgtctttgttccttcttattttggcattcgatatcagcagcctctccccaaagtacttgaagtcagttttagatgctttattttatttttctagtcaaaaacgtgtttcccccagtgtttgaaaactcgtccgaatcttttcagtattttccatgagtattgtggtacttctagacttgtttaagcccagaactcattccttcaaaacagagagccttaatctttatgttgggacacagaccacatatttggacggcagccatgcatccatcgctgaagggctgtggacatgaatgtgtatttcccatggtctccgctgcccacaccaacagtgtggcatctcataagttaactgctaccctaaggtaatctaagattaaaatgtaaacatttatttttgttatgtaagtttataagatgttttatgttcaatgcctaatttctcaaaagtgccagaaaaaaatgtatattagctattttgattttatgtacaatgatttatactctccttttgaaaagataccataaagcacataagctagatcactacaaggagctgttatcttttttctaatcaagtgtttaaaacactgatggtttttaaagactcacctttttaaatggtacttggagctcctgattcaaattacctagaccccctagagaaataaatggaatatacataaataatcattttcagtggtttatggtgggcaatattgcaatatttgaaatggtaaaaatggaaagaagaacaaaatatgatgagaggtggctgtgaattataaacctcataaaagtgtcataattccattaaggtttaattatattttttcagaaaacagtgatgaattctgtagtccagtgcttgccaatgcaaattgcctattggaatcttcttcctatattttacaaacatcagtggctgaaatagctcagagtaagagctcagcctggtttgaatttaatcatctctttagatcttataaggccagcattaggaaacttgttcacttttcattttcaaaggagcctagttgaagtgctattatgagtgtgggctatggaaagacagcttttcctacactgataaagaaaaaaaatgaggaaattatttcatccccttgtgacatctgtgactttttggatttaataatcttgctgtttttcctctttatgacaaagaatataattgggaggatgaagtgtcttaaaaattgtagagaccagctcactggaatgtttttccatccctgtattcatggcttgactttgtgactgctctacactgcatgtctgacattgcagagtgagctatgttgaggtaaactggttggttgtcattattttgcaatcagcctggtctctcccatgaagatgtcgtgtgcataagcacaatcatcactgattagaagatcacagcagaatacccttggattagagagaagttcgtaccttgcatttctctgaattctagtctctcataagcactgctttgctggatgattttcactgctttgtgttaatgactttgagcgatctctcacatgatggggttctttagtacatggtaacagccatgtcatcttacacacctagcattgtgaatgctgtagtgacatcctttataggcaccttacagctcaaaacttttgtttcatttcatgccttacttatcaaaaaggcaggaaagtaggtatgatctctaaagtaaaaaaaa

SEQ ID NO: 1290 - protein, 432 aa, Homo sapien
MGPAGSLLGSGQMQITLWGSLAAVAIFFVITFLIFPCSSCDREKKPRQHSGDHENLMNVPSDKEMFSRSVTSLATDAPASSEQNGALTNGDILSEDSTLTCMQHYEEVQTSASDLLDSQDSTGKPKCHQSRELPRIPPESAVDTMLTARSVDGDQGLGMEGPYEVLKDSSSQENMVEDCLYETVKEIKEVAAAAHLEKGHSGKAKSTSASKELPGPQTEGKAEFAEYASVDRNKKCRQSVNVESILGNSCDPEEEAPPPVPVKLLDENENLQEKEGGEAEESATDTTSETNKRFSSLSYKSREEDPTLTEEEISAMYSSVNKPGQLVNKSGQSLTVPESTYTSIQGDPQRSPSSCNDLYATVKDFEKTPNSTLPPAGRPSEEPEPDYEAIQTLNREEEKATLGTNGHHGLVPKENDYESISDLQQGRDITRL

SEQ ID NO: 1291 - DNA, 1904 bp, Homo sapien
agctatttcaaggcgcgcgcctcgtggtggactcaccgctagcccgcagcgctcggcttcctggtaattcttcacctcttttctcagctccctgcagcatgggtgctgggccctccttgctgctcgccgccctcctgctgcttctctccggcgacggcgccgtgcgctgcgacacacctgccaactgcacctatcttgacctgctgggcacctgggtcttccaggtgggctccagcggttcccagcgcgatgtcaactgctcggttatgggaccacaagaaaaaaaagtagtggtgtaccttcagaagctggatacagcatatgatgaccttggcaattctggccatttcaccatcatttacaaccaaggctttgagattgtgttgaatgactacaagtggtttgccttttttaagtataaagaagagggcagcaaggtgaccacttactgcaacgagacaatgactgggtgggtgcatgatgtgttgggccggaactgggcttgtttcaccggaaagaaggtgggaactgcctctgagaatgtgtatgtcaacacagcacaccttaagaattctcaggaaaagtattctaataggctctacaagtatgatcacaactttgtgaaagctatcaatgccattcagaagtcttggactgcaactacatacatggaatatgagactcttaccctgggagatatgattaggagaagtggtggccacagtcgaaaaatcccaaggcccaaacctgcaccactgactgctgaaatacagcaaaagattttgcatttgccaacatcttgggactggagaaatgttcatggtatcaattttgtcagtcctgttcgaaaccaagcatcctgtggcagctgctactcatttgcttctatgggtatgctagaagcgagaatccgtatactaaccaacaattctcagaccccaatcctaagccctcaggaggttgtgtcttgtagccagtatgctcaaggctgtgaaggcggcttcccataccttattgcaggaaagtacgcccaagattttgggctggtggaagaagcttgcttcccctacacaggcactgattctccatgcaaaatgaaggaagactgctttcgttattactcctctgagtaccactatgtaggaggtttctatggaggctgcaatgaagccctgatgaagcttgagttggtccatcatgggcccatggcagttgcttttgaagtatatgatgacttcctccactacaaaaaggggatctaccaccacactggtctaagagaccctttcaacccctttgagctgactaatcatgctgttctgcttgtgggctatggcactgactcagcctctgggatggattactggattgttaaaaacagctggggcaccggctggggtgagaatggctacttccggatccgcagaggaactgatgagtgtgcaattgagagcatagcagtggcagccacaccaattcctaaattgtagggtatgccttccagtatttcataatgatctgcatcagttgtaaaggggaattggtatattcacagactgtagactttcagcagcaatctcagaagcttacaaatagatttccatgaagatatttgtcttcagaattaaaactgcccttaattttaatatacctttcaatcggccactggccatttttttctaagtattcaattaagtgggaattttctggaagatggtcagctatgaagtaatagagtttgcttaatcatttgtaattcaaacatgctatattttttaaaatcaatgtgaaaacatagacttatttttaaattgtaccaatcacaagaaaataatggcaataattatcaaaacttttaaaatagatgctcatatttttaaaataaagttttaaaaataactgca

SEQ ID NO: 1292 - protein, 463 aa, Homo sapien
MGAGPSLLLAALLLLLSGDGAVRCDTPANCTYLDLLGTWVFQVGSSGSQRDVNCSVMGPQEKKVVVYLQKLDTAYDDLGNSGHFTIIYNQGFEIVLNDYKWFAFFKYKEEGSKVTTYCNETMTGWVHDVLGRNWACFTGKKVGTASENVYVNTAHLKNSQEKYSNRLYKYDHNFVKAINAIQKSWTATTYMEYETLTLGDMIRRSGGHSRKIPRPKPAPLTAEIQQKILHLPTSWDWRNVHGINFVSPVRNQASCGSCYSFASMGMLEARIRILTNNSQTPILSPQEVVSCSQYAQGCEGGFPYLIAGKYAQDFGLVEEACFPYTGTDSPCKMKEDCFRYYSSEYHYVGGFYGGCNEALMKLELVHHGPMAVAFEVYDDFLHYKKGIYHHTGLRDPFNPFELTNHAVLLVGYGTDSASGMDYWIVKNSWGTGWGENGYFRIRRGTDECAIESIAVAATPIPKL

SEQ ID NO: 1293 - DNA, 3828 bp, Homo sapien
cgactccttagagcatggcatggctcagaggtgctggtaaaactgatgggggtttttgctgtccctcccctcagcgccgacaccatgtggatccaggttcggaccatggacgggaggcagacccacacggtggactcgctgtccaggctgaccaaggtggaggagctgaggcggaagatccaggagctgttccacgtggagccaggcctgcagaggctgttctacaggggcaaacagatggaggacggccataccctcttcgactacgaggtccgcctgaatgacaccatccagctcctggtccgccagagcctcgtgctcccccacagcaccaaggagcgggactccgagctctccgacaccgactccggctgctgcctgggccagagtgagtcagacaagtcctccacccacggcgaggcggccgccgagactgacagcaggccagccgatgaggacatgtgggatgagacggaattggggctgtacaaggtcaatgagtacgtcgatgctcgggacacgaacatgggggcgtggtttgaggcgcaggtggtcagggtgacgcggaaggccccctcccgggacgagccctgcagctccacgtccaggccggcgctggaggaggacgtcatttaccacgtgaaatacgacgactacccggagaacggcgtggtccagatgaactccagggacgtccgagcgcgcgcccgcaccatcatcaagtggcaggacctggaggtgggccaggtggtcatgctcaactacaaccccgacaaccccaaggagcggggcttctggtacgacgcggagatctccaggaagcgcgagaccaggacggcgcgggaactctacgccaacgtggtgctgggggatgattctctgaacgactgtcggatcatcttcgtggacgaagtcttcaagattgagcggccgggtgaagggagccccatggttgacaaccccatgagacggaagagcgggccgtcctgcaagcactgcaaggacgacgtgaacagactctgccgggtctgcgcctgccacctgtgcgggggccggcaggaccccgacaagcagctcatgtgcgatgagtgcgacatggccttccacatctactgcctggacccgcccctcagcagtgttcccagcgaggacgagtggtactgccctgagtgccggaatgatgccagcgaggtggtactggcgggagagcggctgagagagagcaagaagaaggcgaagatggcctcggccacatcgtcctcacagcgggactggggcaagggcatggcctgtgtgggccgcaccaaggaatgtaccatcgtcccgtccaaccactacggacccatcccggggatccccgtgggcaccatgtggcggttccgagtccaggtcagcgagtcgggtgtccatcggccccacgtggctggcatacacggccggagcaacgacggagcgtactccctagtcctggcggggggctatgaggatgacgtggaccatgggaattttttcacatacacgggtagtggtggtcgagatctttccggcaacaagaggaccgcggaacagtcttgtgatcagaaactcaccaacaccaacagggcgctggctctcaactgctttgctcccatcaatgaccaagaaggggccgaggccaaggactggcggtcggggaagccggtcagggtggtgcgcaatgtcaagggtggcaagaatagcaagtacgcccccgctgagggcaaccgctacgatggcatctacaaggttgtgaaatactggcccgagaaggggaagtccgggtttctcgtgtggcgctaccttctgcggagggacgatgatgagcctggcccttggacgaaggaggggaaggaccggatcaagaagctggggctgaccatgcagtatccagaaggctacctggaagccctggccaaccgagagcgagagaaggagaacagcaagagggaggaggaggagcagcaggaggggggcttcgcgtcccccaggacgggcaagggcaagtggaagcggaagtcggcaggaggtggcccgagcagggccgggtccccgcgccggacatccaagaaaaccaaggtggagccctacagtctcacggcccagcagagcagcctcatcagagaggacaagagcaacgccaagctgtggaatgaggtcctggcgtcactcaaggaccggccggcgagcggcagcccgttccagttgttcctgagtaaagtggaggagacgttccagtgtatctgctgtcaggagctggtgttccggcccatcacgaccgtgtgccagcacaacgtgtgcaaggactgcctggacagatcctttcgggcacaggtgttcagctgccctgcctgccgctacgacctgggccgcagctatgccatgcaggtgaaccagcctctgcagaccgtcctcaaccagctcttccccggctacggcaatggccggtgatctccaagcacttctcgacaggcgttttgctgaaaacgtgtcggagggctcgttcatcggcactgattttgttcttagtgggcttaacttaaacaggtagtgtttcctccgttccctaaaaaggtttgtcttcctttttttttatttttatttttcaaatctatacattttcaggaatttatgtattctggctaaaagttggacttctcagtattgtgtttagttctttgaaaacataaaagcctgcaatttctcgacaaaacaacacaagattttttaaagatggaatcagaaactacgtggtgtggaggctgttgatgtttctggtgtcaagttctcagaagttgctgccaccaactctttaagaaggcgacaggatcagtccttctctagggttctggcccccaaggtcagagcaagcatcttcctgacagcattttgtcatctaaagtccagtgacatggttccccgtggtggcccgtggcagcccgtggcatggcgtggctcagctgtctgttgaagttgttgcaaggaaaagaggaaacatctcgggcctagttcaaacctttgcctcaaagccatcccccaccagactgcttagcgtctgagatccgcgtgaaaagtcctctgcccacgagagcagggagttggggccacgcagaaatggcctcaaggggactctgctccacgtggggccaggcgtgtgactgacgctgtccgacgaaggcggccacggacggacgccagcacacgaagtcacgtgcaagtgcctttgattcgttccttctttctaaagacgacagtctttgttgttagcactgaattattgaaaatgtcaaccagattctagaaactgcggtcatccagttcttcctgacaccggatgggtgcttgggaaccgtttgagccttatagatcatttacattcaatttttttaactcagcaagtgagaacttacaagagggtttttttttaatttttttttctcttaatgaacacattttctaaatgaattttttttgtagttactgtatatgtaccaagaaagatataacgttagggtttggttgtttttgtttttgtattttttttcttttgaaagggtttgttaatttttctaattttaccaaagtttgcagcctatacctcaataaaacagggatattttaaatcacatacctgcagacaaactggagcaatgttatttttaaagggtttttttcacctccttattcttagattattaatgtattagggaagaatgagacaattttgtgtaggctttttctaaagtccagtactttgtccagattttagattctcagaataaatgtttttcacagattgaaaaaaaaaaaaaa

SEQ ID NO: 1294 - protein, 793 aa, Homo sapien
MWIQVRTMDGRQTHTVDSLSRLTKVEELRRKIQELFHVEPGLQRLFYRGKQMEDGHTLFDYEVRLNDTIQLLVRQSLVLPHSTKERDSELSDTDSGCCLGQSESDKSSTHGEAAAETDSRPADEDMWDETELGLYKVNEYVDARDTNMGAWFEAQVVRVTRKAPSRDEPCSSTSRPALEEDVIYHVKYDDYPENGVVQMNSRDVRARARTIIKWQDLEVGQVVMLNYNPDNPKERGFWYDAEISRKRETRTARELYANVVLGDDSLNDCRIIFVDEVFKIERPGEGSPMVDNPMRRKSGPSCKHCKDDVNRLCRVCACHLCGGRQDPDKQLMCDECDMAFHIYCLDPPLSSVPSEDEWYCPECRNDASEVVLAGERLRESKKKAKMASATSSSQRDWGKGMACVGRTKECTIVPSNHYGPIPGIPVGTMWRFRVQVSESGVHRPHVAGIHGRSNDGAYSLVLAGGYEDDVDHGNFFTYTGSGGRDLSGNKRTAEQSCDQKLTNTNRALALNCFAPINDQEGAEAKDWRSGKPVRVVRNVKGGKNSKYAPAEGNRYDGIYKVVKYWPEKGKSGFLVWRYLLRRDDDEPGPWTKEGKDRIKKLGLTMQYPEGYLEALANREREKENSKREEEEQQEGGFASPRTGKGKWKRKSAGGGPSRAGSPRRTSKKTKVEPYSLTAQQSSLIREDKSNAKLWNEVLASLKDRPASGSPFQLFLSKVEETFQCICCQELVFRPITTVCQHNVCKDCLDRSFRAQVFSCPACRYDLGRSYAMQVNQPLQTVLNQLFPGYGNGR

SEQ ID NO: 1295 - DNA, 3845 bp, Homo sapien
  Unsure 3011-3032: Unknown base
gcggccgcagccccggccgagcaggcgccgcgggccaagggccgcccgagacggtccccagagagccaccggaggagcagctcacctgagagacggagccccggctcgcccgtgtgcagagcggacaaggcaaaatctcagcaagttcggacctctagtacaataaggcgaacctcctctttggatacaataacaggaccttacctcacaggacagtggccacgggatcctcatgttcactacccttcatgcatgaaagacaaagctactcagacacctagctgttgggcagaagagggtgcagaaaagaggtcacatcagcgttctgcgtcatgggggagtgctgatcaactaaaagagcagatcgccaaactgaggcagcaactacaacgcagtaaacagagtagtcgtcacagtaaggagaaagatcgccagtcacctcttcatggcaaccatataacaatcagtcacactcaggctactggatcaaggtcagttcctatgccactgtcaaatatatcagtgccaaaatcatctgtttcgcgtgtgccctgcaatgtagaaggaataagtcctgaattagaaaaggtattcattaaagaaaataatgggaaggaagaagtatccaagccgttggacataccagatggtcgaagagctccacttcctgctcattaccggagcagtagtactcgcagcattgacactcagactccttctgtccaggagcgcagcagtagctgcagcagtcattcaccctgtgtctcccctttttgtcccccggaatcccaggatggtagcccttgctcaacagaagatttgctctatgatcgtgataaagacagtgggagtagctcaccgttacccaagtatgcttcatctcccaaaccaaacaacagctacatgttcaaacgggagcccccagagggatgtgagcgagtgaaggtctttgaggaaatggcgtctcgtcagcctatctcggcccctctcttttcatgtcctgacaaaaacaaggttaatttcatcccaaccggatcagctttctgtcctgtaaaacttctaggccccctcttacctgcttctgaccttatgctcaagaactctcctaactctggccagagctcagctttggcaactctgaccgttgagcagctctcatcccgggtttcctttacgtctctttctgatgacaccagcacagcgggctccatggaggcctctgtccagcagccatcccagcagcagcagctcctgcaggaactgcagggtgaggaccacatctctgctcagaactatgtgatcatctaaaaaagggggagctggcctccaccctgtgttccatggattcggaacaagatttcagacatctgcatgagtgacaaactttctgaacaccaccaccaccaataatacttatcagcatcataaagtatctcttaaacactgatcttggcagggacggaactcctattcagcagtttttgtggaaagcagtaatgcttgcaaaacgtgtgtgtcattcagcattttaagtggagactatgcatttcatagtatatttgacagattagtactgtgtcctgtgttttgttccagattcttcagtataaataagctctatatcaaaaagttgcctgtctaaatagaaaatgtcttgctgtgttttgtcctatggaaaatactgtaattcaggattatgtttacaattgatccaggtgtttgtttctaacttctgtaatacatacaatgcaaaaaaaaaaaaaaaaatggccacaacagttgcacagtgcccaccctatggcctagcttcaggtacttcagttgaagtctaaactcaggtaacttggaatgtatatcatattgggatattaaatatttcacagctaaaaagctaaagagggaacatcactcttttgcctttccttattttatgcatttccctttcctcattacattccacattcttagaataagaagtgcattcaatcctaggagaatgataatcctggacatgggtgaacatgaggagaaccagcaaaatctgtggtgtttgacatcactttgtcatgtggttacaagtaaaacaactgttgcattcactgtttcaacatgtgtacatgtggcttttttaaaagttcaggtgttgctcagtaaaggactgtgacaatgttgcaaataaagtgttcagtactggactgtacataaacattccacattgtgtgtgatgaaatttaaagacaagaatgtctagagttaatttcaaaataagtgaagtgtttgacggaatggttgagatttttttgtttatgttagccatcagggtcataactgttaccattttatctaaagacatatttatatttagtttctcccttggaaattctttattttgcaggtgaaaaagtgacatactttttgttattgtcttcctcaagcagtttaggtgcatgatcttcatttacatagaatacttgggtctcagaattgatgcaacataagcaggtttttttggtgacttacaagagcaatagtttgaagctatctcatttaagcctctcataatgcataatcatgagtagttttgaaatttgcaacctgtgaggtagagcataaactcaagaaaatagccttgaacttgcagacttttgacacaagttctccacaaagtgtgaagagagccccaggcattcctgattggtcaatgggagagcctaactttcattgttttcttcagtacaaagagtatccaaaagctaagtttttgtattccactactttcagttcaataaaacctagagttgtttcatctgcgcctaaagtgtatggcacaattttcttaagaattaggggaaccaggtgcctacagttaaaggaacgtttcagttcctttcattcattcctgggtttttcttttattttctaagaaggttgaagaaggatgagtgatagagaagaaagcaacaccattgatttttttttttaagaaatgatatatatatgtatatgtttgnnnnnnnnnnnnnnnnnnnnnnagtattctgtgcattattttgtcatgatctcaattctcttctttccaccaaagtttgtcgtaatattttctcctgaaggtgcattctggctcctttaaattagtcagtgttatattgtaggagactgtcatggaaaaaaggactcagtttactttcgtcattttcacaggggaaccttttaaaacaatcttttcagcagcagatacctttaaccctaataatctcaggccttgatgaaaatactatattttgtagattatggttaaagggggaaaattactagttccgtaagataaatatgagctccatttgacttctgatgtctggtttagcattacataatatgttgatcttacactctgcttttgtccaaataaaatgcaatagtatcaatatcaatttcagaaaaatggactgaatatgcttttttggtgatgaaatctcatgtacgatatttatagtgatgtgcttttattttctcatgagatactaaatattaattgtgttgtacatttgttcttagcatatattaaagttttgaaccaaatgtgttaaagcttacgctttgccatgtaaatttcccagaagttgttgagctcaaatgtatcctacatccagctgtagaaatttgtcagaaattgtttaaattttgtatataattgtactgtttaattctagccattgcgctgaacagtatttgagttaccatataatatggctttacacaaggaaatgtgtggcttttgttttgtattttttcagtatagaagttcctgtgtcttatttaaataaagttattagtaaaactgaaaa

SEQ ID NO: 1296 - protein, 435 aa, Homo sapien
AAAAPAEQAPRAKGRPRRSPESHRRSSSPERRSPGSPVCRADKAKSQQVRTSSTIRRTSSLDTITGPYLTGQWPRDPHVHYPSCMKDKATQTPSCWAEEGAEKRSHQRSASWGSADQLKEQIAKLRQQLQRSKQSSRHSKEKDRQSPLHGNHITISHTQATGSRSVPMPLSNISVPKSSVSRVPCNVEGISPELEKVFIKENNGKEEVSKPLDIPDGRRAPLPAHYRSSSTRSIDTQTPSVQERSSSCSSHSPCVSPFCPPESQDGSPCSTEDLLYDRDKDSGSSSPLPKYASSPKPNNSYMFKREPPEGCERVKVFEEMASRQPISAPLFSCPDKNKVNFIPTGSAFCPVKLLGPLLPASDLMLKNSPNSGQSSALATLTVEQLSSRVSFTSLSDDTSTAGSMEASVQQPSQQQQLLQELQGEDHISAQNYVII

SEQ ID NO: 1297 - DNA, 918 bp, Homo sapien
gagtagctcaccgttacccaagtatgcttcatctcccaaaccaaacaacagctacatgttcaaacgggagcccccagagggatgtgagcgagtgaaggtctttgaggaaatggcgtctcgtcagcctatctcggcccctctcttttcatgtcctgacaaaaacaaggttaatttcatcccaaccggatcagctttctgtcctgtaaaacttctaggccccctcttacctgcttctgaccttatgctcaagaactctcctaactctggccagagctcagctttggcaactctgaccgttgagcagctctcatcccgggtttcctttacgtctctttctgatgacaccagcacagcgggctccatggaggcctctgtccagcagccatcccagcagcagcagctcctgcaggaactgcagggtgaggaccacatctctgctcagaactatgtgatcatctaaaaaagggggagctggcctccaccctatgttccatggattcggaacaagatttcagacatctgcatgagtgacaaactttctgaacaccaccaccaccaataatacttatcagcatcataaagtatctcttaaacactgatcttggcagggacggaactcctattcagcagtttttgtggaaagcagtaatgcttgcaaaacgtgtgtgtcattcagcattttaagtggagactatgcatttcatagtatatttgacagattagtactgtgtcctgtgttttgttccagattcttcagtataaataagctctatatcaaaaagttgcctgtctaaatagaaaatgtcttgctgtgttttgtcctatggaaaatactgtaattcaggattatgtttacaattgatccaggtgtttgtttctaacttctgtaatacatacaatgcaaaaaaaaaaaaaaaa

SEQ ID NO: 1298 - DNA, 2729 bp, Homo sapien
cggtgctcgaggcggaggggaggaggcggggaaggcgaaaggaggggttcggaggagagggttcgatctccgtacgcaccaggtggagagcgcgcgcctggggaaggaggcgtgtcgagtagcgggagggaagttgtagtacgggtggggagaaccacactaaagggagatgggggtgagcagttaaggaaccgcgagagcgccaggtagagagctgcccttaatgggggaacctggagaagagtgtgagcgtagtggggaagaagggagaagacaaataggttcgggaatgtgtctccgagggcgcgagcgggcgctaggacccggcgtcgaaaagatgaggctttggggctgtcggggcgcgcgctcccgttggtgacgcgggggtggcggaggtctccggccgggacgaagccccgcagggagtggatactcgacagccttcggcctccgctcgcttctccctgcgcgctttcctgctcccctttccggctacagccctggggtcgagctctggtcgaagcgcattccgcctctcctttggccctgcggcttcctttgcaacccgccgcccacccttgctctccgtggtttacccctgggctctgaggcctggtggtagcggccactgccgcggattggctgttgcggacccggggcggggcaggtgggagaggctcgttctccgcgggtttcgttgtgtttcgcgccatgtcgtttgctgagagcgggtggcggtcggctctgcggcgccgcggtcccggcaccccgggccctgtggctcggccatcgtattcctcctttactcagggggacagctggggtgaaggcgaagtcgacgaggaggagggatgcgaccaagtggcccgcgacctgcgggcggagttctcggctggggcgtggtcagagcccagaaagcgctcggtgctcccgccggacgggaacgggtcgcccgttctgcccgataagcgcaatggtatctttcccgcggccgcgggcagcagagcccagcctcggcggtggccggtccaggtcctctctattctctgctcgctgctcttcgccattcttctcgccttcctcctcgccatcgcctacttgatcgttaaagagttgcatgctgagaatttgaaaaatgaagatgatgtagacactggactattaggattctggactctacttataatatccctaactgctggattctcctgttgcagcttttcttggacagtgacttactttgattcttttgaaccaggaatgtttcctcctactcctctttcacctgccaggttcaagaaactgactggacattctttccacatgggctatagcgtggcgattttgaatggcatcgtagctgctcttactgtagcatggtgcctcatgtaaacccacactggagcgatattgttggcaaaacttaatcatgattgttttgtaataacaagaaggagcatcactgtctactcagaagactgagaaacctgctgttcattatgtagttcagatatttatcacaatcatcctcattatggaagaccttttaaagcattgttttagaatgtctgagtattaagatacagattaattgggaatatctgagtattaagtactttcttcagagtataagatgtttacctcatctttttacttttgtgtgtgtagttctttcaagttgtaggaaacattttaatggaatttaaactcaaaaacttgaatacaggacaatgcttgccttttcatgtatgtactacattttttgctaagaaatactgatatttctgtttagttgagctagaaatacttcttatttatacatttaggaaagcaaataatgcctactactccgacttttatagaagctacttttaaatcagaatatttaatttttgatattcatataattaatagaagttgcatttatattttttatggggcatagttccttatgtgtttttttaatgtattttcatactacatactgaatttgtatgtttttaaaattgttacatctagacaactgtaaacattatttttttagctagtgcaaacctagtacctgccatttttactaatttttgtctttaaaaaaagcaaaaaagcacattgacctaagttgaaaattaagtaagtttatttttaacaaaaaatgcctgaaaaaagctaaattatttaagtcattaagatattgagaaaaaatttgaaatttttactatctctgtttccacaattccaaatatttatcttggtgtatatattgttactttaacagaacttgcattattttgtttttaataaatataaacatgaaatttttgtatgtgagaatgattgaactagtttgttcttaatctcaaaaatttagttaccaaagtagaaaaggtattttgatactagatattaaaaactacatatagttaatataattttataatttttgtaattaaatgtgcttctgtaattgtgatattttgttttctaagtaattaagccttaatttttcccctatgttactaaagacttttaatgtttagaaagttacctcagttttagaaagatggactacttacaaagctgttttccctggccataggaaaacttacaataagaaaccattaagtagtcaaactgcttattcaggctaagtgggaaatgaatttgtgcagtgtgttcccttaattatctactgaatgttgttaccgactaaacaaggtttctaaaagtct

SEQ ID NO: 1299 - protein, 226 aa, Homo sapien [sequence omitted]

SEQ ID NO: 1300 - DNA, 570 bp, Homo sapien
agtaacatgactaaaaagaagcgggagaatctgggcgtcgctctagagatcgatgggctagaggagaagctgtcccagtgtcggagagacctggaggccgtgaactccagactccacagccgggagctgagcccagaggccaggaggtccctggagaaggagaaaaacagcctaatgaacaaagcctccaactacgagaaggaactgaagtttcttcggcaagagaaccggaagaacatgctgctctctgtggccatctttatcctcctgacgctcgtctatgcctactggaccatgtgagcctggcacttccccacaaccagcacaggcttccacttggccccttgatcaggatcaagcaggcacttcaagcctcaataggaccaaggtgctggggtgttcccctcccaacctagtgttcaagcatggcttcctggcggcccaggccttgcctccctggcctgctggggggttccgggtctccagaaggacatggtgctggtccctcccttagcccaagggagaggcaataaagaacacaaagctgaaaaaaaaaaaaaaaaaaaaaaa

SEQ ID NO: 1301 - DNA, 2653 bp, Homo sapien
  Unsure 367-438: Unknown base
  Unsure 548-601: Unknown base
gggagttgcagggggagagatggaaaggctagcagctgaaaaaaaataggtaaataaccagtgtattccatgtagctgttaatctagtttgttgcttccatcagctgcaggagtattccatagtatgcatccaccatagtaaatttatccattcacctggttgcctcaaattcttggctacctggagaaattaaaacccttgaagctagggttctgagtacaagatcagttccaccaattagatttcttcatttgagatttgggaggtaaaggctgtctttctgctgtttgggttgttgctgctggaaagcaagtttatgtacatatggggctttctgcaacagctttccagctttgaaaacctgcnnnnnnnnnnnnnnnnnnnnnnnnnnnnnnnnnnnnnnnnnnnnnnnnnnnnnnnnnnnnnnnnnnnnnnnncattcaacaggtaaaataaatctactctgtaatagtataagtttgactacaataaactgtggttaagaagaaaaattggccgggcatggtggctcatgcctgcctgtaannnnnnnnnnnnnnnnnnnnnnnnnnnnnnnnnnnnnnnnnnnnnnnnnnnnnnccagagtaatggtttcttgactttctgtagcccttgttccttagtctgctgtgatatttatgttgacctttatcattttctattctgaacccctcttagcatttaatgtgaaatctaagaaattagaagtagaatggcttttattgttttgacacctttgaaattattattaataatttttccagagcaaaaaagcaaacacgctcaataagactaaacaaaacaaaatataaatgtacatcatttaatgtcccagtggctctattctacctgtaagaaaatgatacaaaaccacctaagatattttgaagcctgacaaatcagcttcatggaaaaaggtaaaaaatgcatttttcaaccgaaagggcagatccaatagaagacccgctccttaaataaacataaaatgtaaaaagttggaaaattaagagtaatgttccatctggaaactgaacttttgtccttgaacttgtgttggcaccaagcctcatacacagtgagctcaataactgttgggacaaaggaaggaaggacaaaatgtgtaacttcccagcatctgggagatgctgtctcttgcctcactgagtgttccttttctttgctctcatgtcattccctgagaacaatgaattctgggacaggctaaacatcatgatgaagtttcttaaacagactttcttagtggaaatccatttagatctgggtgtgctctatggggagtgctgacgtcaaagagcaaatgtctataaggggcccttttaaaatgaacattttcctcattgagcaagctgggattctctaatgtagaaatcaagccatctttataatttcacttcagatgtttatgtttttgtttttttttgtctccaatgatggtaaaaataaaaactacgcattacttaaaggagtttccctcacatgtaaacactgttaggaagtctggattaagttgaaagtcctgttttaactttttttctctcatataccaaacactctgtatttctcttaaagaagccctttaagagaaagccctaattttatatctgacagtaaagtttgctgcaagtgtatgagttcaaacacatcccttgttttctgtccctaggggaaaagtcatgtagttttagcttggctccagtgttaatattatattcagtagcagccttagaagagtggtctaagacttgaacctggagcaattttatagcacagaatcctacgaagataggactgtgaacatttgttttctttttcgtgtgtgtcaaactaactggtttttgctttaccaataaaatgtcctcggcagagtaaattttaaacgtgaaaattatagatcttgatattgaatccatcagtgattcaagagatacacctatttgcctaaaacaacctaagatgtattggttatggaatcatgtgttggataggttcttaagacctgtttcctcaaatcttgacacagttttcaagggtggcttattgacttgcacggttgggcagataatccagatttacctaagattgggtaaaaaagtcatctgtgactttgctggcagggcatttgctaagtggagtacaggatctaaaagggttttcttagaaagggcaatattgtccaatgaagtaagcagaaggactctgggttagaagcatctgcacaaaaactggtgagacctactctccactgctctgcagctggatggctgatggcaggctgagcagtggggaagcaggttttaacaacagggagtccttccaggtcactgtatattgagaagaaacataaaactattgtctgttacattccgaggtcagccttcttcttaacgttttataatatgcaaatgccagcttctggaaagcaagtatcatcatgtaccaaatgctttatacaccatcacattcatgaattttttagcatggtcagaacttgtgtaaatatgtctcttagatgattttggggagatgtgatttatttttcatattttcaaaatgcatttcatttcaaataaagttatctattgagacaaccgaaaaaaaaaaaaaaagcgg

SEQ ID NO: 1302 - protein, 33 aa, Homo sapien
MILGRCDLFFIFSKCISFQIKLSIETTEKKKKS

SEQ ID NO: 1303 - DNA, 3736 bp, Homo sapien
aaaatactttgccaaatgaaatagactagtcaatacatctgatgtccataattattggtaactcagttaccttctaactaataggctggttcaggagactctcccagtttataaatggttctcttgggagcctttggaagctgtattaaatctttcagtcttttatttctaattttttctcttaatctaaatagaggccagttatctattttatcagcttttattcttgaagattctcagattatgttttagtcccttttagctttaatagtccttgaaaaatacattactgtataatgtggcaattctgtaacagagacttattacttgaatgaataatcctaaaattttaatattttagctgaagtttgagatttgtggaatgaacaaaagaattagaaactttcatatgttactttgtttcagtcatctgcaaagtatgaagctgtaattctgaaatacacatccaagtgaatgagaattaaaaattttctaaatattaatactaactgggaaaaaaaaactagtgtgaagtttacagttagaagaaacagacccaaagttgccagaaggtaataaataaatgtagttttcactgtaagtaagttattgacgtaagatgctttatttgtaatatatttagattttgaaagttattgagagatgaatgtataaaagctaaattttcttttctgaagcagtgaaacaaaattggggtaacaaggaagctctgttgtggcaaacatgtctatgaggaatattaaaactaagcatactcccacaggctttaaactcaaaccatgaacatttaaattaagttgttccttattttgcctatacccatttttatctttcattgtcgtttttgcttgacagtatggtgacagagtatttttatttggaaagtcctcagcaagatgaattagccaaaagcaataatggttcagattaaacaataaagtggaattgattcaatcccaggctcaactaagaacagtcgctctctggatgtttcattttagacgatagataagttgagatgttgtaatatttatggggggttaagcctgtgtcagttatgggatgaagacttgtagtaccagtaccatcagtggtcatacttttttttaactttttactaaactaatacagttagacatttccactctatcgtgattatatttttatgatgggaaaataaaaacacttccatgtttttataaatagtctctgcaaagatttcagatgttattggtatctcggtttggcagtatctgaaaaattgagattgtctttgaaatgtttgtgctacttttacttaagtaaacccccactgtgcaagacccaggccggcttcagctaataccaaggtttctgtgtgcataatagtttacagagaacttaagagtaaggactgcggattaaaaacaaaactttttttaactttaaaatttttagtttttgttcaaagtacctggtttataaagtcaaattcttttattagttcctttctcgtttaaattgactgatgttgctgatgaagcttaaagtcccaggcacggttgtggcgatatactgataaaattggtgcctagtggtgggaggagctccagtgtcaggacttttattaaaaggcccttgttttcccaaatgccaatctagccacatttagatttcattattcaataaaacagatgaaaaatcatcccataaatgaatgttgaggttaccaaagtacatcacctgctgaggaaggataaatcttcctgctttaagggagccctgtcatctctcctcttaatgcacgtttcccttggtattagtggaagctgtgttcaagatgggaagcctttcctgcagttcttagaaacacctgctttctaaggagagccttttctaggattagcttatgtgtgttttctctaggcgattttttatttcagttaccaatttaattttcaagttgacagatgctgtgtaaagtctctcataatgagagtagtccattaaattgttgaaagttgcactgcttttcatctttcaggtacctgaaatgagtgacatcaggtatttggaaggagtaagatcataaactgtattcattttcttccttgtacaaagtgatgacttctaatgcttatatctcaaggtattttttaaaaaagcaacggtccctaatagagtaaaatttggttttggtccaagttcccaataatgtatttaatgtttctgttgtttactggtgcctcccgttgcatcaggtagagattgcctgcctctttgtagggcagccttgtggcaccttatgtccaacttggaggatagtatatggcttctttgtgcctctactatcttttcaaaagccattttataaaaatcctaggtagcctattttaatatttaaatatatatatttgtgaaagaacttttagaacagaccttttctttttactttaaaattcctgtatttccatttttaagagtaaatttaatctccaggatttagaagtgtctttccagagaagcataatgagaaagtcagactgaggtaataagaccagaattaagtgatagaagaaactgttgtttggttaaaggacacagatttgaaggaaaaaattttgatgtaacaattttttaaataaaattttgtttttctgtaatgtcatatttgctgctacagtagctcaatattttacagggctaacataaagctggctccatttaaaaactggagtacttcctagtgcagccagcctaggcggaaactgtacaccatggtcttccagatgggtgactgatggctttgggtagctgatgcatgctttaatatttgcctatagcccggcagcaaggaagtcggggcggggggacttttttaccctgccagttatagcattgtgattctttctgggcactggcattttgtgaaactctcaagggaaggtgatgcaggggagaaaatgtgaattaaattacatagatgggtgtttttatgtcttctacccctttcctagaattagtacaactcttaactgtgccagtccccagttcaccagctttgtatccagtcgtcatctcattcaagtatggctttacttggtgacactggccatagctaagttaacttggcatgtttgacttttgacaataacaaaaatggttttggattttgttttatttccaaaaaatgtatacaatatcagaacttcacattttatatactagtatctggctattagtattttacaggaaccatagttcttggtgactacatatatatatatatttttgtgaccttttttgtaaactaagtgccgtttcaacgttacaatcatttttagggttattgtaatcaatgtgaatatcatgttttttcaaatctgttctgagcctatagtgtttgctttgtgaacatgtgtattgtatatattctgtatagttatattgtactgaaattagcttgtttgatataaggaaaatatgtattgagtacctttttgctagcctgattgtttaatctttttaaaaaaggtttaaactttttttaaaaaaaaaatctttaaactggcctttattacatggtcacacataaagttgcagttaggaaagggatgggcagggaaaaactagttttgagtgtctttagatagaaacatgagactaaggtttgattttgttttcgttttctcattaaaatatcttatgctttatggaataaaaaaaaaacaaaggg

SEQ ID NO: 1304 - protein, 25 aa, Homo sapien
MRLRFDFVFVFSLKYLMLYGIKKKQ

SEQ ID NO: 1305 - DNA, 826 bp, Homo sapien
ttccggccttgtaatcgccgagggcacgtgcatgccccctggttaagagttgcaggtagcggtagcgatggacactctggatcgagtagtaaagcccaaaacgaaaagagccaagagattccttgagaagagagaaccgaaactcaatgaaaatattaaaaatgccatgctgattaaagggggaaatgcaaatgcaacagtgacaaaagtacttaaagatgtgtatgcactgaaaaaaccatacggtgtactatataaaaagaaaaatattacaagaccttttgaggatcagacatcactggaattcttttcaaagaagtcagattgttctttattcatgtttggctcccataataagaagcggccaaataatctagtaataggtcgtatgtatgactaccatgtgctggatatgattgaattaggtattgagaattttgtctctctaaaagacattaagaacagtaaatgtcctgagggaacaaaacccatgctgatatttgctggcgatgatttcgatgtaacagaagattatagaagactaaaaagtcttcttattgatttcttcagaggccccacagtatcaaatatccgcctggctggattagagtatgttctgcacttcactgcactgaatgggaagatttactttcgaagctataagttgctgttgaagaaatctggttgcagaacaccacggattgaattggaagagatgggaccctcattggatctggttctgaggaggacacacctggcatcggatgacctttataaattatctatgaaaatgccaaaagctctcaagccaaaaaaaaaaaaaaaa

SEQ ID NO: 1306 - protein, 253 aa, Homo sapien
MDTLDRVVKPKTKRAKRFLEKREPKLNENIKNAMLIKGGNANATVTKVLKDVYALKKPYGVLYKKKNITRPFEDQTSLEFFSKKSDCSLFMFGSHNKKRPNNLVIGRMYDYHVLDMIELGIENFVSLKDIKNSKCPEGTKPMLIFAGDDFDVTEDYRRLKSLLIDFFRGPTVSNIRLAGLEYVLHFTALNGKIYFRSYKLLLKKSGCRTPRIELEEMGPSLDLVLRRTHLASDDLYKLSMKMPKALKPKKKKK

SEQ ID NO: 1307 - DNA, 5587 bp, Homo sapien
caacaacaaaaggacttggactggccggcctgggcgcacgacccgagggctggagtcggccccgcgcctgccgtctgggtacctgaacgaggtgcagcgcagccggccccaccgcagctacctcagcagtcccgccccgcccgcgtccttccccgccgagccggcctcgctcccttccccgcgcaccccgcacggcccgggcccacgtacaatgactcttcttgcttttcacctaagttgaataagcaccctgtgcactttaatctcctgtcggtaccattgggccaactaaagacaaggttttgaaatctcagctataaaagacatccagccaaactctcagtcttgccttaacaatgttccagaggctgaataaaatgtttgtgggtgaagtcagttcttcctccaaccaagaaccagaattcaatgagaaagaagatgatgaatggattcttgttgacttcatagatacttgcactggtttctcagcagaagaagaagaagaagaggaggacatcagtgaagagtcacctactgagcacccttcagtcttttcctgtttaccggcatctcttgagtgcttggctgatacaagtgattcctgctttctccagtttgagtcatgtccaatggaggagagctggtttatcaccccacccccatgttttactgcaggtggattaaccactatcaaggtggaaacaagtcctatggaaaaccttctcattgaacatcccagcatgtctgtctatgctgtgcataactcctgccctggtctcagtgaggccacccgtgggactgatgaattacatagcccaagtagtcccagagtggaagctcaaaatgaaatggggcagcatattcattgttatgttgcagctcttgctgctcatacaacttttctggaacaacccaagagctttcgcccttcccagtggataaaagaacacagtgaaagacagcctcttaacagaaatagccttcgtcgccaaaatcttaccagggattgccaccctcggcaagtcaagcacaatggctgggttgttcatcagccctgcccgcgtcagtacaattactaatagtttcaagttttgttggttggtttctcttggtttgtgcttacatgtatggatgtgtgtatatgtacagtgaaaatgttgtctctttacaaccaattgataaccaatcacatagttttatcagtgtatttagacactatcttgaaaatcagatttatatgctgtgtatcacataatgccttgcctttaacatttactttttttgtacactttttcagattatttctggaaacatatcaatataattacagtgtttgggggtgtctttaaatatattaggttatacattagtcagcattttaaagacatttcttcccaagtacgagaataggcatctttcattttcattttattttgtattacttaatcttttaagcaagcaaaaatttattctcagggtcagctgtacactttattgaccagtacttgataatctctctgtatatgatgaatacatttttacacactaacattagcattaacaggtgatagttgccatggatataatggaattatggctggactttcttttgaaagaaaacttgatgtattctgtgtgtatggtttttccccagattagtcatacagttcatttggaattcaggtacattaagctttagtgaagagtgcatgcagtaattccaatgtgactgcatgacgtggtacagacattacaggtgttgtagacagaggcacttgtctcgtgcagagggattaaattagacctgtgagattatatttggaaaaattcatgtctgtaactaacccattagtgcagtatttaatttgttactattccttcccgccaattctgtccactcctcacctcgcatcagctataaatttggaagtacttgtccaggcactcaagtgacttcatatttctctctgcccatgggaaaagagataggctttatatttccacagagtgaaaaatcctctgtcatggagcctgtcctgccaagtggcaagagtgtggggactgtctggtgatgatgtctttcatggcatctgagtgaagagtgacaggttggctcaacttttttctttttttttttttaattgccttgtattgtaagtattcttccctgcagtccaagtgacttttcattttttgttttaacttcaggcaaaatctttaaccactctggcctctgtttcccccaccaacggggagcagtgacatttacctccctcacagagtcactgtgaggattctatactgatttgaagtggagctgttcagaactgaaccttgtaggaaattccaagggcctttctactgaatctggtgatggggtggggccgtggcactttctctgccacagctgttcttcacagtgttggtgctaatgaggccagggtgcagggttcgattcacacgtaggccagttaacttagagaaaatctatttccttacctctagccagtcacttcctttttccgcagttgtgatgggttttgctgagccatccactctgactgatttcctctgaagtaaacatatttacaatccaaagcaattctactgacagaagtgttgccttcataatcaaacagcttgtttttccatctcctctgcaaccctaattaaatgagtacaggtctacaaaatgttttcaaggagaaaagcagcatatccttaagtgaagtattatatttttcaataaccctgtagtggcttgatgcagggaaccctgggggactttcagcgaagagctgtgctcttttctgactagattagagcgtttggagtggaagacgtcaaatgtgtagtgagatggaggttttacattgttcttctactggctgtgatgaagtgccagaatgtctctttagaacaagagttagattccccctttctccttattgccccttccgttttgacttcccctttatttatttgttgtctaattaggggccaagtctgtaaagttttgtcaaagtgagttagaagttgttttctcttactatttgtgtttaccagagttgggagataagatagtttccatgaaggtgtgtatgttttatacgatgtttgttatagggccatgcattggtaacttgaaaatagaccagcttaatgtcttcaggatgtaaaactctgaatacacggcgtctctttttcatacattgcatgtaagttgttagtacctcacaagctacagaagttcagccatgagattttgtttggcaacatgaacagatttgtgtataactgcaatggcctttttttccagatttccttattgactttttgtttgccttacctggggctagttttttatgctttgtacctagaaaacaaaaaattacattcgttgggctttttttcaaggttgggattaccacaccacctggaatatcatactgtggtttctgcctaaaattggcacatgtaagtattgaagaaaatggttatataattcagttgaaactcttggttattagatgttaggcatctcctgtatgtaagacacaaggccaaccacaacacagaacgatgttgacctgttaagtattctctgaaacatggccaaaatgcattttatgagcttttttttttgctattgtaaatattagtggtttacaatgcgctttagacatatttctttaaaatgcaagcagtgagaaataagacctctctgaattagtagctctaaactgttaacatagaatgttacttggaaaaagtctggaatatgtggtgtacacaagcagtgcttcgtgaatgagtttcttagcttttatagtgcgccatgtttctcaaagtttgtttttgttgacaaaacattttataatatatatcttatgtttattttttttctcaactaattgtgtactgcactgtaaggtgaaaattagccatccattatttatcttctgtggcaatgcatttatatggttgattgggtggggaattttttgcagaaagatgcaaagtgattgggttttcgacttcctatcgcagggagcttttaagaaatattaatttcctatacatttttccaatccccatgcaaactgttcctgtttacataccttctctgttgtatcagtactttgagtgagaagacagtttatttaaaacttgagcaggctgttcagcattgtttctgcttctgaaatctgtatagtacactggtttgtaatcattatgtcttcattgaaatccttgctacttctcttcctcctcaatgaaatacattatatattatctttatgtactcttaagaaaaacgagcaaggaagagtatcttcattattctcattttctctgagttggaaacaaaaacatgaaggactccaactagaagacagatatttacatttaaatagattagtgggaaaactttaagagtttccacatattagttttcattttttgagtcaagagactgctccttgtactgggagacactagtagtatatgtttgtaatgttactttaaaattatctttttattttataaggcccataaatactggttaaactctgttaaaagtgggccttctatcttggatggtttcactgccatcagccatgctgatatattagaaatggcatccctatctacttactttaatgcttaaaattatacataaaatgctttatttagaaaacctacatgatacagtggtgtcagccttgccatgtatcagtttcacttgaaatttgagaccaattaaatttcaactgtttagggtggagaaagaggtactggaaaacatgcagatgaggatatcttttatgtgcaacagtatcctttgcatgggaggagagttactcttgaaaggcaggcagcttaagtggacaatgttttgtatatagttgagaattttacgacacttttaaaaattgtgtaattgttaaatgtccagttttgctctgttttgcctgaagttttagtatttgttttctaggtggacctctgaaaaccaaaccagtacctggggaggttagatgtgtgtttcaggcttggagtgtatgagtggttttgcttgtattttcctccagagattttgaactttaataattgcgtgtgtgttttttttttttttaagtggctttgtttttttttctcaagtaaaattgtgaacatatttcctttataggggcagggcatgagttagggagactgaagagtattgtagactgtacatgtgccttcttaatgtgtttctcgacacattttttttcagtaacttgaaaattcaaaagggacatttggttaggttactgtacatcaatctatgcataaatggcagcttgttttcttgagccacggtctaaattttgtttttatagaaattttttatactgattggttcatagatggtcagttttgtacacagactgaacaatacagcactttgccaaaaatgagtgtagcattgtttaaacattgtgtgttaacacctgttctttgtaattgggttgtggtgcattttgcactacctggagttacagttttcaatctgtcagtaaataaagtgtcctttaacttc

SEQ ID NO: 1308 - protein, 240 aa, Homo sapien
MFQRLNKMFVGEVSSSSNQEPEFNEKEDDEWILVDFIDTCTGFSAEEEEEEEDISEESPTEHPSVFSCLPASLECLADTSDSCFLQFESCPMEESWFITPPPCFTAGGLTTIKVETSPMENLLIEHPSMSVYAVHNSCPGLSEATRGTDELHSPSSPRVEAQNEMGQHIHCYVAALAAHTTFLEQPKSFRPSQWIKEHSERQPLNRNSLRRQNLTRDCHPRQVKHNGWVVHQPCPRQYNY

SEQ ID NO: 1309 - DNA, 6543 bp, Homo sapien
  Unsure 1403-1445: Unknown base
caacttgggtgaacagccaactaaatgcagtcctgaagaagatgaggaggacgaggaggatgttgatgatgaggaccatgatgaaggattcggcagtgagcatgaactgtctgaaaatgaggaggaggaagaagtggaagaggattatgaagatgacaaggatgatgatattagtgatactttctctgaaccaggctatgaaaatgattctgtagaagacctgaaggaggtgacttcaatatcttcacggaagagaggtaaaagaagatacttctgggagtatagtgaacaacttacaccatcacagcaagagaggatgctgagaccatctgagtggaaccgagatactttgccaagtaatatgtatcagaaaaatggcttacatcatggaaaatatgcagtaaagaagtcacggagaactgatgtagaagacctgactccaaatcctaaaaaactcctccagataggcaatgaacttcggaaactgaataaggtgattagtgacctgactccagtcagtgagcttcccttaacagcccgaccaaggtcaaggaaggaaaaaaataagctggcttccagagcttgtcggttaaagaagaaagcccagtatgaagctaataaagtgaaattatggggcctcaacacagaatatgataatttattgtttgtaatcaactccatcaagcaagagattgtaaaccgggtacagaatccaagagatgagagaggacccaacatggggcagaagcttgaaatcctcattaaagatactctcggtctaccagttgctgggcaaacctcagaatttgttaaccaagtgttagagaagactgcagaagggaatcccactggaggccttgtaggattaaggataccaacatcaaaggtgtaatcagcctcattggaccactggtcagaaatgtctgcgttttgtcacgttatccattgtaaattttcattctgttttgcatgtcagttagcattatgtaaacatttacaattaggttacattgttttaagaactaagtagcataagtgaagcatgatccaaaatacttgattattgcattttcagagcataaaccatgattaaaactgctactggcatcagaattgaaaatcatatgtttaagtaaatgttaggtacagattacaaaaatctgttaaagcaaaacattttggaggagtgaaatagtaaaatgccaagtattgtggcagatttatgctctgaaccacacaaaaaaattgaggaagcatttttttaaacagtcggtttaaattgtttttagaattattgctttttgttctaattttccacaaccattaatctcacttgtatatggcacacccagcacttgtgcctgtgggccatattagatgttcattgtcagagctcaagatgnnnnnnnnnnnnnnnnnnnnnnnnnnnnnnnnnnnnnnnnnnncacaaatgtctgtgcaagtaagaaaaaaaaagcatattctttgtgccttgtattttggggaaactctaaaactggtaatattttgtatgatgaaaaccctaatgagaaaaaacaagatatatagatggaaaaattatggggtttaaatgtttttttgttccaactctttttcagattttttgaatgtatataggactatgttgaaatgtagatatatgccacagagtctgtgtattgtataaaaaacaaaacaaaaaacaacaaaaaaaagatggctctagaaaactcatatttcggtacttgaccggaagaagacaaatacttgcacattattgcgattgttttattttttgtaccaaagacaaatgcaactgatatggcaaactgccagtctaagtaaagttttgcacagcttacatgatactgtatgaatgtatgaaaaaaaaggagaaaaaaaagaaaaaaaaaggtcagggttagggatcttactgaactgtgaattttatttctgtttgggtccaattatctacagaaggagcatccatacatacaaatattattttgctgttcctctagttcgcttccatagtagataagttggtggccatttagatgtcttttatttctgcacttattgtaggaaattttaatatatttcattttagtaagctattgataaaatagtttttgactttgaaaattaaaatgtttatttagcttattgtagtatacttccaccagacaacaaaatagattatttttattgtattatgtatatatatatatgtaaagaaagaaaaaagctaaaaatatctaattctttagttgccacttttccaattgatgtattattgtgcatgtaatattttcaaagatcaacacaggctaaaacaaaaacaatttatagatttttatatttttgtacaggtattttcaaactagcttcttcaaacttaacatgtgacttattcttctatagtttctagaattgagaaacattaacacatttagtttttaggtgctcttttttgctcatataaaacagcttcattagtcagtgttttaactgtgttcaagctttacctcttgatgagaaatttcttatgtcaaggcagcattataaaccttcccccacagatttttccatcctgtctctcttactgttttattctcaaatcttgtgctttgaactctgaaaactggtggcttaaaaactaaaaaaagaaaaaaagcatatttagcaaggaaaaaaataccaaaaatttcaggcatagctgctggaaaaattatctatttctccattacccactgtaggatttcttttttaattatactttgactataaagtgtcaaagtataatttgttcttttcttttactttgttaccccatttgtaagctatagcatatgaagctatatatatagcttgtgaaggtttgatctagaacacccagtaacaaatgaacaatgttgcttacctgcttctttgacatcttaaaaaagaaatccaaggaggattgtaaggattgtcttaccaccttagctgaactgtgatgcacaagatttttctatgtgtttggtggaaatgtacctggtttgtacattcacgctaaacagatgataagctcaagtctgatggtttaatagaatgtaagttcatcgtttaaagcttttcctttttaggttggagaaggcaaaacacaggcttgcaagttggaagtatatgaagtcttgacagagtgtgtctggtaaattgaaaagtgtttcaaactatggcagttttgcaatcaggtgaaaatcacctcatgatattcagctgataaggtttataaaattgcccctttctagctgctctgttaggaattctggtttttgatacttttttcctgtctgcaaaccagaatttgattttttggtcttgcatttcaaaaaaaaaaagactttgaatctgtttagtagattccatatctttgagtttcagtgttttatatgtactacttaagttaaatagttaaaagcttttaaatagttgagctttttaatgttgacactttattttgtacctatttatatatgtatgtatatcttagaaaagcactttgttaaaaaaaaattgcattttatatgattcctgccatttgctgctaaatctgggctggtcagaatgctgcagcgatacttgatctatataaaaacctggcagtaaaatgtagagtgaaagttaaatcctcttgctgttttaactttatcataaagatgacataggcaagctgtgcagctttacattttaaccaggggactctgtggcatttaaaaccgtctagaaatggttgtactttaatgccagtaataatctgcttcctctattgtcattaaaatatatacgtttagtgtatcacacaaaccaatcttataagggtaatgtaaaaaccccaacaattgtacatgttctgtttttgaaaattgtggcatgtatttttgggtgaagatcattagagaagagttctctaaaggttttctgtgttcatacatggtatacagatagctcataatgaagtccagaatcttacttttaagtgaaggcattgtgaattcacctcaagtaaacccattgttccaaagcaattataaactttgactctagtactactatgatttaaaaaaaaaaccaacaaaaaccttttttcctagtttcagatacactggattctttatagagtttgtctccatatgaaagcatgctgtccagtcgctcttgttaagatcttgtctgagttttgaattgggtgccacacttttccagtcaatataattgcttgttctactgtaccatgtatgattcttgtcctttcctatatccttcatgacagattatgatgtggctttatattgtgccttacttgtacatttaaaactaaacgtcttcattcccttccacttcctacatctttaactttgacctttttggtaagagaatcagaactattacaaaagcatcatgaaggatttcagatgggtatggtttcaaattccctctctttatagttattttatatttgtatgaaagaccagttttggatggtctttgaatataggggggaaagattagcagtaatttcactacatcccttttctctgactttcatgcatttctcatacatcttctttctgatgcttgactttatttgcttcctagcaatagtctgcatttaaagaaaggtgtgttcaattcatcagcttgaaattgactatttcatttttccaggattttttaggagaagagtacccattttgttttataaaaacagatgacaagtctctttaaaagaaacagaagtacagtacttttgaaatacaatgctgttagtttggatttctttttatatatatatataatattcatacaatgatctgatgtttgccttcattaataaagctgttagtttattcaccaaaatgtcaagaatggatgtgcttttctttattccacacatttaaaaaaatttagctgctaagatttaatgttataagaaatgaattcaagttgccttcagcaagaattaacaaaaacttatgttccctttctttatatagtttcctaaaattctgttcaagtattttctagttaattatgtaacagaatgttagcatctctccatatcttgaaacttgaattttgagaatgcattgaattatgctttcagtgttaaagtaaaaggtttcaattatccttctagtgaagtctgttgtggaataccatttcccatggaactgaggccatttccacaactttgcacagaactgcagtcttgttcttcccttggatcatgacaaataagtctcacacagtgccgtaatacttgtggattcttttgtaatctttgtaatcttaataagggcattatgagaagacgactccatgtttttttaatacttcaaacacattgggatgtaacaatgaatgtcaactgtaggaatggtggtttcgttttaaggaataagcatgttggggaaagatgatgaaaatgtactactgaaagttatacacttccataggcaaatgggattatgtgttgaagcatagtcctcatgcttaataaactgactgaaatcgtagaaattacacctaggaactgagctaggccaaattgccatttttgtttagagagttttggaggtagtagtgaggggacagagccttaaaactacttccaaacagtattttggaattgaagacttggtaactagtgaagaacatcaaagttgggtatttcaatgtgccaagtttgggtgaactaggttcggtttgcctctttcataacaatgtaaacacaatggtgtagttaattaaattctgggtggataggagcaggactgattactatgtcttgcccttcgccctttgtttttttcagaaccaaataacagaaatgtgtatgtgtgtactgtatctgcctttccaccacatttttatgacactgtattccactgcctgcttttttaccttctttccctaggatttgtcctacagcttagtattgtggttgacagcgatactagggctgacagcacagaagtcacaagagaagagtggaagggcaagaattcaaagcatttgttcatacaatgtggcaacctcttttgcatagttgcgtaggatcctgtttgtaatgctatcataaatattctgtagttttttttttttctctcccaactggagctatgacactttttattggattcagtcttgtctcttgtctagaaagaactttatcttgttgacgcatgagctgtttaaaaattatcctattaaatgttggttaatagttgtgcagtttttcatttcagatggaaaggcaatgcaaattttgcctttgttttctgtcaccttccaacccctgagcacttctagtcagatacagattcatcagtgtatgcaacatcctttgtaatttaaaataaaaaaagatgaaaagaaaacgttctgaattgtttgcctcatgttttcgcccttcctttctgtacttatatcttgcttacctaggtaaccatccgctcctcaagataacctattccaaagaaattccaaatcacagag

SEQ ID NO: 1310 - protein, 296 aa, Homo sapien
NLGEQPTKCSPEEDEEDEEDVDDEDHDEGFGSEHELSENEEEEEVEEDYEDDKDDDISDTFSEPGYENDSVEDLKEVTSISSRKRGKRRYFWEYSEQLTPSQQERMLRPSEWNRDTLPSNMYQKNGLHHGKYAVKKSRRTDVEDLTPNPKKLLQIGNELRKLNKVISDLTPVSELPLTARPRSRKEKNKLASRACRLKKKAQYEANKVKLWGLNTEYDNLLFVINSIKQEIVNRVQNPRDERGPNMGQKLEILIKDTLGLPVAGQTSEFVNQVLEKTAEGNPTGGLVGLRIPTSKV

SEQ ID NO: 1311 - DNA, 1734 bp, Homo sapien
ggcacgaggctggaaccaaacagtttggcatgtgtgtcagtgatacacaaaatagttttgcagattatggttgtatgttacaaattagaaacgtgcatttcttaccggacggaaggtctgtggttgatacagttggaggaaagcggtttagggttttaaaaagaggaatgaaagatggatattgcactgccgacattgaatatctggaagatgttaaggttgagaatgaagatgagattaagaatctcagagagcttcatgatttggtttactctcaagcctgcagctggtttcagaatttaagagacagatttcgaagccaaattcttcagcatttcggatcaatgcccgagagggaggaaaaccttcaggcagcccctaatggacctgcatggtgttggtggcttcttgcagttctccctgtagacccacgataccagctgtcggttttgtcaatgaagtctttgaaagaacggttgaccaagatacagcatatactgacctatttttctagagaccaatctaagtaactaactctttggatctccctttaaagtgaccctaatctggctgcattgatggccagattgtctgctgcctttgcacatctagtgctggtttcagaaatttaatgaaacttttctttttccttcgacctcctgaatcatgtggttctgcaaatgaataccttcaactaggatttagaccactaagaacttgcacagaaaaacacgcattgaatgtgtgtcgaacctctacattgtgaagttgcactatgtaccatactctaaaatgaaataagaactctttatgtctgtgagagagtgtgtgtgtgtgtgtgcgtgcgtgtgtgcttgtgggggttgggtagtgtgtgtgtattttctctggctttaaaatcttaaaacaaacaaacaaaaaagccatagagagcagaacttgccgagggtcatttattgcccaagtttacaagagtagcgatacaagtttttgcaaattgaatttgcctcagatatatctgtcctaatgcttatatttgcacaagtatgtaaaatatcgtgttgaggatcattctttgttggaaatactgctcttgctgaactgtcttgaccattgactatgacacagtttcttatttatgtaaatacttgcatcacagtggccgacaggcattggatgcagaacctagagccagttttcaggaacaattgtaaacctgacatggtactgtgcatctattcataaaacactcaaaactgtgaaaatatggtttacatttaattgtacataaaggtaaagggagaactcaattcagtaccagttagtttgtacattttagggggcttttcacattaactgcccatttgtgtaatttatagtttgacatgatgtgtttgttttaaaaaaaaatgcatagtataaacccattaaggatctgggaaaagagaagaagtttaatatagaactaagcttttaaagtttgtttttgtttttaattctggtctcggtgcaaatgttagttatgccttattcatatcacagttagatcaccatgctgcaacatggtttatattcatgctgccctagaaacttttgtaattatttgttgcaaatttgtgactgtccttattaactttcttttatgtaagtaatttgtaaaagtttcttaaaatttttgcttttgcttatttaattttgaataaaagctaaattcctaaaaaaaaaaaaaaaaaa

SEQ ID NO: 1312 - DNA, 4699 bp, Homo sapien
cagggctggcttttttttttttaataagatagctggtgcccaagattgttttccaccttaaggataaaacctgttaagaaagcctgaacaattacaaaaaaggaagaaaaggagacttggccaactggtgtcaggagtcttaacaaggtcatagtttgccagcccctgccctaaacaaataattcttgaatgcctactgtggtgtgtaagatatgagtaaataccagggatacacagagaacaaaagagaaaaactgctattcttgtgaaacttggaagttggaggagacttggaagatgcagaactggatgactactcattctcatgctatagccagttggaagtgaatggatcgcagcactcactgacctgtgcttttgaggacccagatgtcaacaccaccaatctggaatttgaaatatgtggggccctcgtggaggtaaagtgcctgaatttcaggaaactacaagagatatatttcatcgagacaaagaaattcttactgattggaaagagcaatatatgtgtgaaggttggagaaaagagtctaacctgcaaaaaaatagacctaaccactatagttaaacctgaggctccttttgacctgagtgtcatctatcgggaaggagccaatgactttgtggtgacatttaatacatcacacttgcaaaagaagtatgtaaaagttttaatgcacgatgtagcttaccgccaggaaaaggatgaaaacaaatggacgcatgtgaatttatccagcacaaagctgacactcctgcagagaaagctccaaccggcagcaatgtatgagattaaagttcgatccatccctgatcactattttaaaggcttctggagtgaatggagtccaagttattacttcagaactccagagatcaataatagctcaggggagatggatcctatcttactaaccatcagcattttgagttttttctctgtcgctctgttggtcatcttggcctgtgtgttatggaaaaaaaggattaagcctatcgtatggcccagtctccccgatcataagaagactctggaacatctttgtaagaaaccaagaaaaaatttaaatgtgagtttcaatcctgaaagtttcctggactgccagattcatagggtggatgacattcaagctagagatgaagtggaaggttttctgcaagatacgtttcctcagcaactagaagaatctgagaagcagaggcttggaggggatgtgcagagccccaactgcccatctgaggatgtagtcatcactccagaaagctttggaagagattcatccctcacatgcctggctgggaatgtcagtgcatgtgacgcccctattctctcctcttccaggtccctagactgcagggagagtggcaagaatgggcctcatgtgtaccaggacctcctgcttagccttgggactacaaacagcacgctgccccctccattttctctccaatctggaatcctgacattgaacccagttgctcagggtcagcccattcttacttccctgggatcaaatcaagaagaagcatatgtcaccatgtccagcttctaccaaaaccagtgaagtgtaagaaacccagactgaacttaccgtgagcgacaaagatgatttaaaagggaagtctagagttcctagtctccctcacagcacagagaagacaaaattagcaaaaccccactacacagtctgcaagattctgaaacattgctttgaccactcttcctgagttcagtggcactcaacatgagtcaagagcatcctgcttctaccatgtggatttggtcacaaggtttaaggtgacccaatgattcagctatttaaaaaaaaaagaggaaagaatgaaagagtaaaggaaatgattgaggagtgaggaaggcaggaagagagcatgagaggaaagacagacaggaaaataaaaaatgatagttgccattattaggatttaatatatatccagtgctttgcaagtgctctgcgcaccttgtctcactccatcctgacaataatcctgggaggtgtgtgcaattactacgactactctcttttttatagatcattaaattcagaactaaggagttaagtaacttgtccaagttgttcacacagtgaagggaggggccaagatatgatggctgggagtctaattgcagttccctgagccatgtgcctttctcttcactgaggactgccccattcttgagtgccaaacgtcactagtaacagggtgtgcctagataatttatgatccaaactgagtcagtttggaaagtgaaagggaaacttacatataatccctccgggacaatgagcaaaaactaggactgtccccagacaaatgtgaacatacatatcatcacttaaattaaaatggctatgagaaagaaagagggggagaaacagtcttgcgggtgtgaagtcccatgaccagccatgtcaaaagaaggtaaagaagtcaagaaaaagccatgaagcccatttgatttcatttttctgaaaataggctcaagagggaataaattagaaactcacaatttctcttgtttgttaccaagacagtgattctcttgctgctaccacccaactgcatccgtccatgatctcagaggaaactgtcgctgaccctggacatgggtacgtttgacgagtgagaggaggcatgacccctcccatgtgtatagacactaccccaacctaaattcatccctaaattgtcccaagttctccagcaatagaggctgccacaaacttcagggagaaagagttacaagtacatgcaatgagtgaactgactgtggctacattcttgaagatatacggaagagacgtattattaatgcttgacatatatcatcttgcctttcttggtctagactgacttctaatgactaactcaaagtcaaggcaactgagtaatgtcagctcagcaaagtgcagcaaacccatctcccacaggcctccaaaccctggctgttcacagaaccacaaagggcagatgctgcacagaaaactagagaaggggtcataggttcatggttttgtttgagatttgttgctactgtttttctgttttgaattttcttctttgttctgtttttactttatttagggggactaggtgtttctgatattttagttttcttgtttgttttgttttgtgttgtctgtgaatggggttttaactgtggatgaatggaccttatctgttggcttaaaggactggtaaaatcagaccatcttattcttcaggtgaatgttttactttccaaagtgctctcctctgcaccagcagtaataaatacaatgccataatcccttaggtttgcctagtgcttttgcaattttcaaagcacttccataagcattccttccacctccttgataggcatttatggaaagcctgctacatgtcaatcatactgttaggcacaggggacctaaagacacataaaaggatggcattctgcctcataaattgcaaaacctaatgaaagtgactgcttggtaaacaaattattattatattataaaatgctataaaagagccatattgaaagtgccctgttggagacagggcaaatgccacaaaaatgatgtaaatttacatggaggaaaagtagaatctgcctggtttgtaggcagcagaagacatttttcatcagtgggcaggtgttctttaccttttgtagaaatgggagtcaagtctcaaataggaggctccacaaaatctcatgccaggtctctgataccttattcacagaagttctttgaagtatttattgttattttctttgacttatgggaaaactgggacacaggaagacaggtaaattacccaacctcacacgttaagtcagaactgggagccataattttgtatccctggtataaatagacaatctcttgaagaaatgaagagatgaccatagaaaaacatcgagatatctccagctctaaaatcctttgtttcaatgttgtttggcatatgttatctttggaatttagtgtctgagcctctgtctgttactgtagtatttaaaatgcatgtattataatcatataatcataactgctgttaattcttgattatatacctagggacaatgtgtaatgtaagattactaattggttctgcccaatctcctttcagattttattaggaaaaaaaaataaacctcctgatcggagacaatgtattaatcagaagtgtaaactgccagttctatatagcatgaaatgaaaagacagctaatttggtccaacaaacatgactgggtctagggcacccaggctgattcagctgatttcctaccagcctttgcctcttccttcaatgtggtttccatgggaatttgcttcagaaaagccaagtatgggctgttcagaggtgcacacctgcattttcttagctcttctagaggggctaagagacttggtacgggccaggaagaatatgtggcagagctcctggaaatgatgcagattaggtggcatttttgtcagctctgtggtttattgttgggactattctttaaaatatccattgttcactacagtgaagatctctgatttaaccgtgtactatccacatgcattacaaacatttcgcagagctgcttagtatataagcgtacaatgtatgtaataaccatctcatatttaattaaatggtatagaagaac

SEQ ID NO: 1313 - protein, 296 aa, Homo sapien [sequence omitted]

SEQ ID NO: 1314 - DNA, 1107 bp, Homo sapien
cgggcgagaagggcagacgggacatgcagcctcttccgcctgagccccggaagtgatgtggctgcggcatcgcggcctcgctatgtctgccattttcaattttcagagtctattgactgtaatcttgctgcttatatgtacctgtgcttatattcgatccttggcacccagcctcctggacagaaataaaactggattgttgggtatattttggaagtgtgccagaattggtgaacggaagagtccttatgttgcagtatgctgtatagtaatggccttcagcatcctcttcatacagtagctggggaaaatgccagaatgtagttgccatcagatttgattgtgaacaaggactgactgcagaaaataatggaaaggatgtttaactcttttatctccgaacattgaatgagataaatttccagatgctgttctctattttaatgttattggaccaatgttctgtataaacaattaagatgtaaccatttaatagtctgtaacaatcaacctcagtactgtcactacaatattacattctgcaaatgttattctgttgtatcagatacaaaattttagtgaggtatctctaaggcacatagtagaaaacaaaattggttaattactcaagttcctttcactgtgatttggaaatgatttaatctttatagaatgagaaccttttttggactagcttttttattaaaatggctcaatttgtgttgataaggattgcattaatatttaatagtgcttgcttttcctctgggcacaccattttgatcattaaccagagtacctctactcttagcaaactctagtttatgacaagtatttaaaatatttaaaacaagcttatgcagttcttaaggacgaaggtaaatgagatgtaacttaaaaatagtattgggaaaatgttgatagttaacattagtggatttagactagccaaatgacatagtaggctctgaaacatcttgtcaagtatatgtattttgtgcatgaatttttgctggaaagctgtctttctctgaaaaacacaacgttcttagaatgaaaagaacaattataaaataaaaaaaaaatttaaaaaaaactgggcggggg

SEQ ID NO: 1315 - protein, 72 aa, Homo sapien
MSAIFNFQSLLTVILLLICTCAYIRSLAPSLLDRNKTGLLGIFWKCARIGERKSPYVAVCCIVMAFSILFIQ

SEQ ID NO: 1316 - DNA, 1088 bp, Homo sapien
ggaattcggcacgagcccgattccgcgcccgccatggccgacaaaatggacatgtctctggacgacatcattaaactgaaccggagccagcgaggcggccggggcgggggccgcggccgggccggctccagggccggccgccgcggtggggcgcaggccgccgcgcgagtgaatcgaggcggcgggcccatccggaaccggccggccatcgcccgcggcgcggccggcggaggcggcaggaaccgaccggcgccctacagcaggccaaaacaacttcccgacaagtggcagcacgatcttttcgacagtggcttcggcggtggtgccggcgtggagacaggtgggaaactgctggtgtccaatctggattttggagtctcagacgccgatattcaggaactctttgctgaatttggaacgctgaagaaggcggctgtgcactatgatcgctctggtcgcagcttaggaacagcaaacgtgcactttgagcggaaggcagatgccctgaaggccatgaagcagtacaacggcttccctctggatggccgccccatgaacattcagcttgtcacgtcacagattgacgcacagcggaggcctgcacagagcgtaaacagaggtggcatgactagaaaccgtggcgctggaggttttggtggtggtggaggcacccggagaggcacccgcggaggcgcccgtggaagaggcagaggtgccggcaggaattcaaagcagcagctttcggcagaggagctggatgcccagctggacgcctataatgcgagaatggacaccagttaaacagaccagcaaatccgcgtgcggaacaggacccaggcgtctcctcttgctccctggttggggggcggtggctggggctgtgcgcccaatgatggatttgtttcttttatgttttaaaataggatttaaaaactcatgtaaaggttttttttttttcttttttttttttttaattctgaaacagacctgttttgtaccgagttatttttgggataaattttactggttgctgttgtggagaaggtggcgtttccaccttttccataataaaatagaaatgtgtgtaa

SEQ ID NO: 1317 - protein, 255 aa, Homo sapien
MADKMDMSLDDIIKLNRSQRGGRGGGRGRAGSRAGRRGGAQAAARVNRGGGPIRNRPAIARGAAGGGGRNRPAPYSRPKQLPDKWQHDLFDSGFGGGAGVETGGKLLVSNLDFGVSDADIQELFAEFGTLKKAAVHYDRSGRSLGTANVHFERKADALKAMKQYNGFPLDGRPMNIQLVTSQIDAQRRPAQSVNRGGMTRNRGAGGFGGGGGTRRGTRGGARGRGRGAGRNSKQQLSAEELDAQLDAYNARMDTS

SEQ ID NO: 1318 - DNA, 1088 bp, Homo sapien; identical to SEQ ID NO: 1316

SEQ ID NO: 1319 - protein, 255 aa, Homo sapien; identical to SEQ ID NO: 1317

SEQ ID NO: 1320 - DNA, 4403 bp, Homo sapien
  Unsure 3322-3548: Unknown base
atatgactaaagagtcctctggaatggccacaactgagagataaagcaacctcagggtcctgggagggcaaagcttggccatcacagcttctcaagtctgcaacagagaaactcactccaagagcaagaagccaaagaaagaaaaactaaagatgatgaaggagcaactcccattaaaaggcggcgtgttagcagtgatgaggagcacactgtagacagctgcatcagtgacatgaaaacagaaaccagggaggtcctgaccccaacgagcacttctgacaatgagaccagagactcctcaattattgatccaggaactgagcaagatcttccttcccctgaaaatagttctgttaaagaataccgaatggaagttccatcttcgttttcagaagacatgtcaaatatcaggtcacagcatgcagaagaacagtccaacaatggtagatatgacgattgtaaagaatttaaagacctccactgttccaaggattctaccctagctgaggaagaatctgagttcccttctacttctatctctgcagttctgtctgacttagctgacttgagaagctgtgatggccaagctttgccctcccaggaccctgaggttgctttatctctcagttgtggccattccagaggactctttagtcatatgcagcaacatgacattttagataccctgtgtaggaccattgaatctacaatccatgtcgtcacaaggatatctggcaaaggaaaccaagctgcttcttgacattaggtgtagcatgtctacttttaagtccctcacccccaacccccatgctgtttgtataagttttgcttatttgttttgtgcttcagttgtccagtgctctctgcttgaatggaagatagattataggcttattctttggtcaggcagaactccagatgaaaaaaaacttgcatcttcagtatacttcctaaagggcaatcagataatggatatgtcttatgtaattaagagttcactttagtggctttcatttaatatggctgtctgggaagaacagggttgcctagccctgtacaatgtaatttaaacttacagcatttttactgtgtatgatatggtgtcctctgtgccagttttgtaccttatagaggcagattgcctccgatcgctgtggttcttattatcaaaattaagtttacttgtatacggaacaaccacaagaaatttgattctgtaaagaatcctctttagctgtggcctggcagtatataaatggtgctttatttaacagaatacctgtggaggaaataaagcacacttgatgtaaaaataattgttttatttttattgacatgactgattgattgctattctgtgcacttaattaaactgattgtgatgacttttcatttgtttacatacgttgcttcagtcttctcaggtgaaagtagtgagaaaaccgtgaaagaggggggaaacatttatccattatatgctgtttcactggaagtgttaccagcagtccacagaactaatgtgtccccacagacttctcaatcctctccacaccgaagtgcaaaaccacagcagggagatgtgcagggagatgtggagcaaaacacagccaatttgccctcacctcaacatgcttttgaatgcaatataccactgttttacgacctaagatctacacaccttaaaaaccctaaagtaaaataaaggaatagtgtcaacatgccatttattttttgtcatcttgaactaaaagtacagctgcaagcaagcttgctataggacaagcttcagcttgggaaacatcaactatctgcactcaggacttacctatttccagaggaatatcgatggaaggtcaggttaatacttaatttcaggttgtttgctacttttaaatcaatgcagtgtctagttataataaagagtcaaacaatgctttacattgtatatatgttcatagatttcatccaatataaaataaagacagtgtttttaaacaaaagatagggaagaggtaaatgtgacactttttccgcttacaaaaagtaatgccttataataaattttaattcaaccatttaggggggtcagctgcagtgaaccttttatttcttcaaaatgctgcttctgccaacagaatttcatgttctcttctttacagatagatagataggaactccttcaattgtaattctgtttgccctagagtaggcacaaaattcagtgcaaaccatggcatagtgttcttctggccagttcccacatctccatttcatgatgatcttcttatttgttaacaatcctagatattcaccagtgatgttcccatcaaacatctggaatttccctcccttttcagtttctcctttacagtgaagatgctatacagctgctctacagttgtgtcaaacagttccatcatgtgaagagccacagtgggaatccttacacccagtgccactggagatgaggcctgaacctgcagggtattcccactcagttttcttttgacagtcaattcctgggttgccatagctttcgttggtaaaatcattcccgttgtaaattctcagtgtcatctacttcattttcctcagaaagattgggtatttcaatcaatcccttgtgcttcactccagattctttaacgatgcctttccagcccagtttgatgttccactcatagaagaaaatcagctttcctttgcggctgctgcacgaagcctccccttccacctgcttcaactcgttgatctcgccgcggccagcgtcattctccacaacgatgcccaccaggagctcctggaacttccctttggacaagctggtggcatcccgctctgtcctgccagggaccagaaagtcgtgaatggaagccccagctgggatccacctgcctgggtgccagggtcacgtccaagcccagcccagatcggcccaagtcctctcaagcagcctcgaaacctgccaacctccaatgtgctcctcaaacctgctttctatcaaattcttttcatcctgctcagttctttaagatattattgtccactatgcaagtagtattctgtcttaaaaacactggcttatttaagggacgaggatctagctagctcgcccactggaaataggcaaagcctaggccacagggaaagtagcagtagtgaaataatcagaatcatgacaataccagctatcaagtgtcttcgcatatacatcgtctaatgtaatcttcccaggtaatattctcactttaggggacagaaacgagctgagagaaatgacatgtccatcgggccaaggctaggacactagaaagtcagatcnnnnnnnnnnnnnnnnnnnnnnnnnnnnnnnnnnnnnnnnnnnnnnnnnnnnnnnnnnnnnnnnnnnnnnnnnnnnnnnnnnnnnnnnnnnnnnnnnnnnnnnnnnnnnnnnnnnnnnnnnnnnnnnnnnnnnnnnnnnnnnnnnnnnnnnnnnnnnnnnnnnnnnnnnnnnnnnnnnnnnnnnnnnnnnnnnnnnnnnnnnnnnnnnnnnnnnnnnnnnnnnnnnnatgccctcagagctcctccggaccagccaagtcatgctcctctggggaccggcctcagcatcccctcgacggcctggagggaccacagccccggccagaggcgcagggcagaggacatcccttccggaggttctgcggcggagggctgccgacctctccccacgcgccaggtgaggcgcgtaaaggaaggggagcttgtctcactcacagagggcccggctcgcgggaggcgcctgcggggtgggcgcgaactgagatccaaatttctgccctttccactacgttccatacccccgcccctaacacagtctctcaatccagctcccttctaactccccgaaacatccagaggggtgggcgggaggagaagggaaggccctcaggccacagacggtgggagtggaaaggtctgtcggaagtcactcttggggcccaacccaactttcaaaaagaggcagctgcaaccctcctagccggtctccgtactcaaggactctcccgagcccagaggcgaaggccgagccctgcgtccagcagctgagggggggcggccccctgaccccctggccccgcggccccgcacagaccccagggcagccccggctcccgcggcccggccctccccagatcccggaaggaggccgccgccagccgcgccagcgccagttgttcacgttggtcccgtcctcccgctcctccacgatccagtgggggttccctggccccacttggccatggcggcgtggactgggcggaaaacaaggaaaggccgcggcgcctaaggctccgaagccagcgtttccggccgccgagccccgggcggcgcgttcgcagctcccagaaactgccagaagc

SEQ ID NO: 1321 - protein, 175 aa, Homo sapien [sequence omitted]

SEQ ID NO: 1322 - DNA, 4282 bp, Homo sapien
  Unsure 4057: Unknown base
tgacaaaatcttttatttatttaaatgttagtaatacgtttattgatgagactaggagcttctctgcagcatcttcataatacattggttttagttcccacactattcccacatcttatctgggaagattagaaatacagatgtaatatggaagcttcaacagcatgggggtggtgatagtgtcctatttgcccttggtaaaatattaaagcgtatttcttaacccaaagagtgattggttatatgaatatatttgaaaaagttaaagcaaatttgcaaacctttacaaaatcatgtatcaattttatgctatccagtttttacgtacccatgtgtcaacatttcatatatccagttctttgggtgctggttcactttttttcatttattcaaattcagaaaaatacggacggatctaatgttaaattaaccagaaaccctggaacattcatatcttgagagggaatttgctactcttttacttttgggatttcattataaaataggctcattttatacatatgtcctgtggtctgtcttccagagtgtgctgtaatcataagtctctagcaaagagtggagggtggagggtgtgtagaactccactcagcctcatggatacatctacaagtctctcaacccatcctgttacagttctccatgagagtcacctcacacttggaaaagaaggaggttaaagcagagtattgttggcagccagctatgcccatcctcttgtaaataactttccaacacacccatttccttgccttaaggtgcaggttcctacttctacaaaatttcaaatgattgcaggtcaaaaacctttggagttactcacaaataataataaaatttcaaataactagggtctacttgtccatcaagatgacattaccagtggaacccacctgttaattttaaagtagcttcagaacccaacaaaaattatgtaagcctggttaaatgtccttttttcttcttgcctctaataaaatcaggatcttcggccttgatactaaatatgtgtatatttagttatgatggtacttgtagatgctcacatttccagttccaaactcgcccgtactttttatgtgcttcaaaatattggacacatttctgttaatatatgatttctgtatccacaaaccgctgtttgcttatgctgagtcaatttagaagttaatttccaatctagtctcaactgcaatgcatttaaaataggtaaaacaagtaaatgagtttgggacattttgagattaatgttactgcccacttgactgtcaatttcaaatggctcctaatgcaaccaaaattataaccaatgtagcatgtgtaggaaaggtatttttaattatttaaaatcattgtgtatattacagcagtatgaggaatgcctggctaaagaggattttttaaaagatgaagaatggttttgcttgtattatataggcttactgagtttgtgagcagcataaaaacaatcattccttaattcttcattgtggaactgaaatatttctgtaatgcattttttaaaaggagactcctagacacagctgtaatagtgggaatagaaatgtagagcttttctcataacacaaaaccagaaaataattttcagcactttgacttactctatgtaataaggaaaaaaattgtttccacaaagttgaactatgtagtaatatttggtaacatatggcatggccactttatatcacagaatgtgtgtcaagttgcaaagcatacttgggccatagcagacactaagaattaaaactcttaaatcagtgaaacaaaaactaatgggcagcattctctctgtttggaatgggatcagtatacaattaatacaatttaattttacacattccctaagacaccatttttaagttacagtcacatgagtgtttgtataaatttaagtcaatgcttttagcctaggcaaagctaaatacaaggtttttggggttttcttttttcagctttattattgaagtattacaaacttaacatcagataccaatgtgtaaaaagtactattgggtccttaagggctctatcagggagttgaaatttcatacgctttaccaggttacttgtaaaaaatgaacagctgtaagacatttcaaaaccattgcagacacattgttaaaatgcagccatttgataatgaaagcagaaaccttaagttttacctaattattgcactaaatgtaaatgataacataaaattaagtgtgcattttaaacagattctatttcccacttactgcttagcatagaaaaagagctatggttagaggagtgaccagcaagatttatttcagatggaaaaggggtgagaaagtggaagcaccttactgttagagcatgttgcatctatttagtgctactgaacaattcagtagttatttctgaactttgctgcaaagtgctctttagttaaagcacattaagaagggtcactgcttaattgctttgtaaaatgaagcaatggtattttttatccgatatagtgtaatttaaaagttttcctacaaagtgagtttatattgttgcctaaactatgttatgtaagcaaaggttttggaaaggcgggagggagtctagattcggcgagagtgtgcgtttgtgtgtgtgaatgtatgaaaagtttccccattgggttattcttaagatgtgtttattgtaaagttttctacgttttgcccacagtaaatgtacaacttcgcaattgtaggatttaattgattgaattccaaatttatactgtctcttcccttctgcagagacattatgccactgtaaggtgcatgtacagaaaatacctctgaggttgacttgttaaataactgatgaatgttatttcacactgaatctcaaagcagtcatttgttttgcgggttaggggaaagttttgttttttgctggtgttttttgttgtttttaattaggcacactaagagtggctaaatttgggggaattggtggataggaaagaccttgaaaagtgatgtgtagatgaaaacacaaggtatggatgttggttacagagttcagttttaacaagggaaatttggggatttttttttttttacttgcatgttctatgggtagctatcaaagggtgtaacaaattattccagcttttcccaatactaattatattggttttaaaaagtctgcataatcactaggtggcattttcccttcatttgtgaaccaagaggggtaaatgatgctacccatacagtgacttctgagttctttaactttgacagaatctccattgtttcattgaatttctcattgtattatatgtctttccaagtgtgcaaactataatatgtagttaatgaaaaatggaaggctgcagattattttgcatgaataattaattgcccattagggctaaggagactgacatgatttttatcggttctgggtaaatgaaaattttaatggaaaactcattcaccatttactagctttgtgcaatattataaaaggtagaagcaaaacactagcacattgtgctttgcttggcttgtaaggatggctttagtaccattacattaaatggacagtgtgcacagtgtattgtaaatgccaactcttgcaaatttacaatacttaaatatgttcaattaacatcctaaagtattaaaagtacagaggaaaaactaagcaagcatttatagcaataccatgaaatctccagtaatcgttttgactgttgccttttgctctttagtgcagcttttctgcattgtaattgtattgctttgtatttcatgttttttacactcatgacttcagagttaagtacttgtacaccaagtattgcaatcacctttctcttgttgtacatgcaatgtaacaacctacagttttggtgcttttaacaatattcctctttttctttaataaaggatatttatttgaattaacctgattttgtttgtttaaaatatcagtggtacatattttcacttcatttcaaataggaggaccatagcaaattgtatatctgttatgacaaaagttntaacatggagaacaggatccagagaccatccatgcctgtatttctgcctcttcctgagcgctgtttgttgtgacatattttgatggcaactttctttgtgctattaatgaactttctcattgtttataaatattcacaaagtttggaagtgctgacttccaaattggaaaatttttaaatgggggtggggagaggcagaaaaatatttataaagttacacactca

SEQ ID NO: 1323 - protein, 25 aa, Homo sapien
TKSFIYLNVSNTFIDETRSFSAASS

SEQ ID NO: 1324 - DNA, 5765 bp, Homo sapien
gccatgtcctgcaatttatgtactatggaactatagagctgagtatgaataccgttcatgagattcttcaggctgccatgtatgttcaacttatagaagtggtgaagttctgctgctcttttctcttagcgaagatctgcctagaaaattgtgcagaaattatgagactcttagatgatttcggcgtaaacatcgagggagtcagggagaagttagacacctttctgctagacaactttgtgccactcatgtctaggcctgactttctgtcctatctgagctttgagaagctcatgtcttacttggataatgatcatctgagcaggttcccagagatagagctgtacgaggctgtgcagtcttggctgcggcatgatagaagacgctggagacataccgataccatcattcagaatatccggttttgcttgatgaccccaaccagcgtttttgagaaggttaagacatcagaattttatagatactcccgacagctccgttacgaagttgaccaagcattgaattactttcagaatgttcaccagcagcctttgttggatatgaagtcaagccgcatccgttctgcaaaaccgcaaactacagtatttcgaggaatgattggacatagcatggttaacagtaaaatacttctcttaaagaaaccaagagtctggtgggagctagaaggcccacaagtacctctgcgacctgactgccttgctatcgtcaataattttgtgttcctgttaggcggggaagagctgggcccggatggtgaattccatgcttcttccaaagtattcaggtatgacccgagacagaactcctggctgcagatggcagatatgtctgtaccacgctctgaatttgctgtaggtgttattgggaagtttatttacgccgtagcaggcagaaccagagatgagactttctattcaactgagagatatgacatcaccaacgataaatgggaatttgtggatccttatccagttaacaaatatggacatgaggggacagtgctcaataacaaattgtttatcaccggtggaatcacctcatcttccacctccaagcaagtgtgcgtgtttgaccccagcaaagaagggaccatagaacaacggaccaggagaactcaagtggttaccaactgttgggagaataagagcaagatgaattacgcgagatgctttcacaagatgatttcttacaatggcaagctttatgtcttcggtggtgtctgtgtgatcttgagggcctctttcgaatctcagggatgcccttctacagaagtatacaacccagagactgatcagtggaccatcttggcatccatgccgattggtagaagtggccatggtgtgactgtgctggacaaacaaataatggttcttggaggcctttgttataatggtcattacagcgattccatcctcacttttgatccggatgaaaacaagtggaaggaagatgagtaccctcggatgccctgcaagctggatggtttacaagtatgcaacctgcattttccggactatgtactggatgaggtcaggcgttgcaactaatgacatcctcctccctaaaaaaagaggcaaacaaagtatttgtttgcacagagtaattaattaaaacatataaagaaaaacctcaccagttttactatcaaagccattggtctaacattgtaagaatttttcattctgtgctagcatcctttttttcttttcagtggcctcaaactcatgcaataagttaattctaagtgctagctcttgaaactacttccagaagcagttgaatagaatgctccacttatctgggatattgattttctgctttaaacatttctttcagatgttagcgtaggagtcatgtgtcttctaagagaagacccgataagtgtcactggatgtgatttcagtctctgtctctatctgaaacctttttgaagatttatttcagtgtatttcagtctgttatactttttagttttattatttaaaagtttaaaactcttgacctttttgcatggctttttgctgaaaatgcaaaaatataaattttctacaaaattaactttttatattcaaaacactatttctaagctgccttctcttatccgcattgtgttagtgaaagcatattcatactcgcatacaacctataaatacacaaggcacatcccttttatgcgtggttaggattctatatttttaagctagtgcacttacttgcacacacagttcgccatacttgttgaattttagatgtaacgtcttttcacatattaacatttttagaaagttgaaataactggagtcctcatttgctatcaaagtagcctatcttcagtccatactgattcagtaatatttgaactccttatatttctgaaacatgtatggttatgaaaactaacaccttatattttattttcaaaagtaaatgttagtgttctttgtcgatgtatgtcttttctttttgaaaatgtttttctttgcagtctgtttaacgttaccctgtttttagtgagaatcggagtggtatatgacaagttctggccctgcagcatgcaagcacttttaaagagcatttaggtaataccagactcctaaatcaaggccccttaaaagtaagtgcaactcccattttttacattcagtaaggctgctgcatttgttattgaatggaaggtagaaactcttagaaaatttgacctcagttttgacttagaggtaagaaatagaattataatgttactggttttatctacttgtttattttgtacaaaatacccagcgacactagggatgtaagccctcagtttttgttttatttactgaaagctattagcatgaaggatagtaaccacaaagttcagaatggatcaagaatagctgtttaaaagcatttataataagtgttttaggattagctgcacctttcaactctttaaatgcagaggaaaaaacatagttgacaaagttaagcaagaataacctgggagtggatcattgaaattgatgccatttgcgcatgagtagtctatatctgatacagactagatctatactggcaaaacttgccagatcttagaatattggtgcaatattgcaatgccttctatatggctgctgatgtataaattttctagtttcactttgtttggtgttttttgtttttttgtttgtttgtttgtttttttgctgctgccaccattgaacataaaatggaagtgtgaagtcatggaaatgtgaagactttggtttttgggggttttttgggcagttattagacatactatgagattaaacctgatcttcaaactccagaattggaggcatttgggtttaagaaaccaggtacataagtagcttttgaaaaaaccattggcattgatttcaaaaatcaataataatcttattttatatatgagacttatattttcattaactagtcctgtcatttacttacagtttccaaacatgaaatttggtatcttgtttcccatggtaatatgggtaaaagtctttttctacatttaaaaaatacattattttatttttgaaagttaggaataagttagccatttaatttttttctacattagtttagtggctttgtatgtgtgctattttgctttaaagaaaataacgtcttcattattttcctcattgatgtcttttgctagaaaagaccaagaaagagccatcaggccaggtatccacatcaaagcctttacactatagtggtggttctctttaattgcttagatatgacttcatgaccctagtcagggtgacatctgggcaaacatttgagtattcttggtcttccattttaaagacagaggccaagatcaaagttcatgttttgtaaaattcgtaaaatcttaacttgaactaactctgggttcagctttacgtaagtcacgtcggacctgatgttagctgtaatcagttttgagctttaaggatagttgctgttgcttgggttctgaatgtatgagaaaactccctgtttatatgtagttctaatttaggttattttaaatccatgattaacttacattcccttttaaaattatggttttattgctgcaagagatttatttttgttatactaaactatggaaaagtttttcatagcatttttttcaagtttattttttgtgtgcttcatttggagtttttgtttatatacattgcgctcaaaaaagtagttttttgaaaaattcagtaagatttgaatctatacagtttaactgttatgacctttatgcgtgttgttttcactttatatctcaaatgccagagttcacaaaaatagctgatcttcattaattacatcttaattagaaccatttgttctcttccgtgtctttgaccttctaagttttgattttaaagaaattccttgcactacagccttttcttaaaatgcaagattctcactttgaaggttttgtgttggaagaaatgctactggtttttaaaaagcaaagcttaactaatagaattattagcttttcttgagacagctttctgtgtcctcattactctgctctgtgtgagtgttactagaatttgtgaaatactgactgagcccttcacttatcttttctaaagcagcacctttggacacctcattctgggaagcctgctcgagtcatagtaaaggacacacgctttatgtggggagaagtggtaaaaatggagttttgtcttaattacatgaaactaagctttaaaatattttataacagattatttgagctgcataatctaaacatgtcaaacgttcagtgggactatttttatatatgtatatgtgggtgtaggtcataacatttcagtttataatataaattgttatttcagtttataagctatctctcagaggagactagctcttttgagaattcataatttaaagttttagactgaagtaaaatgcaacatagataatagtgtaaatcagatataattgagggctatatggcagtaaaactgctagtgccagttttcttgtttgcctgttatacatttttgatttttgtttttgtattctgaacattttgagagatcatatgtttgttcaattacatttagagttggtttgggaataaatatcttctaaaaagagatttatcttaaaaatggaagtcctaaaaattagtttatccagagtttataaagtcaaatattcagtaggcatagactggaatagataaattcatggaaatcatatcctttcagtacaccgtataacttcaatattacacaagtaacattgaggagaatgccatcagctttgttctcccttaaattctttggttttctttttacattttgggaacaactgcatttaaaatgttattagtcagtatatagtaaggattaggtgtttgctttctgaaggaatggtccagtgaggtgattgggagaggttattttctacctaacttgtatatgccctatacctcttgggcatactttgtctatagaaaaatattttgacctttaggtacattttgggccagtagtcaaataatcctagggccgatataaaaatcttagaataatttaaggtttgccttttatacctgttttgaaagcctttacatttttgtcaggtaatttttcccaagccgtggatataatctattcaaacatgtttatgctatccattctgtttttaaattgaaaaaaatgttaaaagtgtttatgaagaaaagtttaaataaaatatttttaatcttt

SEQ ID NO: 1325 - DNA, 3804 bp, Homo sapien
  Unsure 343-382: Unknown base
  Unsure 1239-1264: Unknown base
gctcatttgggggcatgaatgttctccttactaacctctcatggagtcatgtgataacagccatgtcatgtgtatggatgccaccattcttgaatttctgctagaaataagtaggttgctatgcacttagagtcatctttgcaagggactcattccaaaccaattccaatcgacctgaaagtcccttgcactaaagaaatgtgatttttttttaacccaaggagaaagttggttgtaacaatttttcaccagaattagcaatctgatagaataggcttttttaacaggaattttaaactggcggtgccagttgcagtgaaggtgaagtggctattgctttatnnnnnnnnnnnnnnnnnnnnnnnnnnnnnnnnnnnnnnnncctgaagatagagcgttgaacaaacccaatggtcttggccctcaaaaagctttatgtgacatagagcatccagctcgacaattagcaaacccctgatattattcatggacttgacatgaggtttggactattcatgagcaacagcagaaggtccatgacccctacaaatttacatttttctatggcccatatttgaaaacctcacattcggagcaggccactttatattcgtgagtgatcccaagctcactgaccaacagaaaagatgctaaaaaaatgtgtcctatcatgtgcctgctccaactgatgggtaatgtctgcctttaagccccagaatggattctccaggcacagtgtggaagagtgctgtggttgattagcaatgtctgccttgggtgaggaaaggggaacactcctcaagtgcctcctactgtcatctccattcagcctagcaccacatccccatgtagaagtgttgtcttctactgcttgccacgtacaagtgtgaaatgccaaggtgagactcgtacacttggggatttgcaatggtttttacccctcatgaaggtcagaggtggactatttgtacacatacacacatgcacaccctctcacgtcctccagaggctgaaagaccatcagcatcttggtaactgccatgcatgagcagcaaggacagccttccataatccatgccccatttcctctggaagcctggaaacttttcatttcctgttccttgctaattaacatctaaacatgcttctcatttccagccattgctgatgcttctcagttgaagtttgagccacatccctcttacagctagtgaatgagttggtagcagatactgtatnnnnnnnnnnnnnnnnnnnnnnnnnnaggggagggtgggatggggtgtgggtaagttttgccttttgttttgtttttgatgccgtatatagtgaaggggtgaggatattctaaacaaacaaaaattgaataatttattcacagaaactattaagattgtattgtaaagctcacagcaagctcagtgggcagcagctgcaacatctcaccggggaaattattttatttaacgtgagtgagatgtgggccggagaaggtagctgaagctatttataaaacgttgtgtaccttcttccgagctctctcccctttgtgaagggcgcagcaactatacccttgatggatggagatttatgcaatgtgttttactgggtagagtgacagaccttggctgtccctggaattgagaatctggaccttatttccaggcagagaacactgtcctcagaaatgggacttctgataatgaaacaggttgtccaacattttctaatacgcattctacagaacacaggttccaggaggcatcaggttggtgtgatgcagactaagggttttgtggtcaaatatccttaagaaacaaagttaagtcagtttcctttctgcaaggacttttcagccttcaatgtgtgctgtgcatggtgaatccccaaaaataatccttgagtctgtagcatttcctgaacttacatgaccaggatactctattttgcagatcaccccacagagctagggttccaccgagtatactttgcttaggttgacttagcatatctgaggtcttcaaggataaaaactgccaccccaacacccttccattaaaaaaaaaaatacaaaatagcaccacagtctccatctggtttatagcaacagaggtactttatttaatgaagcaatggttctaatcctggatactgccacggactacaattctatccctcccagagggagtggaggaagtcttgggtggtgtggacagaaggaagagaggagagggtgagtggggtatagggcccagggtggctccctactcctcaggctcaaaaggatgctcagtgggaacagatgatctcttgatgagtgcttcttcagtttcatagtttggaatcgttcactgtgtgctttttggggggttttcaatggaaattcacgttgctttgcatttctgtgtccgtctttggtcagttgtgcaagcctgctcactgtcatgtgaagatggcctttcatctggcttctctctcttaagtgagaaagattgtccttcaggggacatgacatcaataggtttctggaatgagggactctttctccccgtgttttgctttgtgttcacattttcttttctaatggcattgaaactttaaaaaaaatggattcaactgtttttgcagaatgtagaaagtattctgtgtccttggttaaagaaatccacttgtgaagtgtgcctggaaaatgaaagtttgtgttttttaaagaggaatatttgaaactgctttctatgcatgcttagctggagaaaagtacaggcaggcgtcccatctcccagccacttctcaaaggtgctgctgtgttttaaagaccaggtacagccagggcagtatttgcaaggacattcctgcttactttatccctttggttggaaagctctagatgattcccgcagctcctccagaccccgcctccctgccctccccagctggtctgggaagaggtggtctgctgacctgtggtatctcagaggggacgttcctcctcctccctgtgcaccaggtgggctgcaccctcctgcctattcaggatgtggatgccacaggagagcagcaggcagtggaaacttcagttgcactggttctcctggtggcaaaggcatgaagcacaggggtcgattaatccaggctactagaaagctccagagcaaagtgtgcgggtcccacaaatgcttggctggtggggtctggatcagtgctgagatagagttggcagaagaagcagaggcactctgcttgctttcctagccagtcctcccctaacaacacaacacaacaacacacacaatctcagctgcgccattctgtgcaatcccagtgaccaaatcccttccttgcccacctctatgtcagcaggactgaccacatcactcccccgagttcccaccaccagcatttcctccaacctttttccatcacaaccagttagaaccctacaggcaacaaggccttctagaatccgcttaacccttggctgataacaggcaaatttcagtctgctacactttgttaggtccagaaggagctgcccatactactttcttatgagcatgctcagtatggcatatggacatgtaatgtcacatctttgtggagtgtgattttctttttttacatatttgtatgcagtagagagcctgttgtagaaaacgctccctgtatcttgctgtactgttaaagaaagctgaattccacattgccaacaaaagcgtgaaaatgttcatgaaccttcctccaggaaaagccattcaagcctgattatttttctaagtaacttcaattaaattgaagaaaaaagag

SEQ ID NO: 1326 - protein, 170 aa, Homo sapien [sequence omitted]

SEQ ID NO: 1327 - DNA, 3555 bp, Homo sapien
  Unsure 1438-1515: Unknown base
ctggctcagtcattccccacttagcctcccaagtgttgggattataagcgtgagcaccatgcctggccccaatttaaaatgtggaattcagttggtgtccaagacttatcttgagactcttaaaagcatcagtctgtaactagaacaaatacagtcttagatttacccaagtgcctagatatcattttataatgattagaattgagtattgtgggtcccctaattctgtgggtgccttaagtgagaatttctaaatgattttcacattctaaatgactttgggttttgaactctccatctagtttacttctaaaatgggaacttgaggcaattcaggtatccaggcaaatctttgtatatatttttttgtgtacatgcacacatctcgaaatccatttccgtgtttaatgttagttgtttatgtgttagtattcctgtgtctactgttttgttgttgttaatatgggtaaagtgagccctgaaatacatgctaaacaagacatgaaatgcagaaaggtacatagtgtttcaagtgcatggtagtttgatctgtgttttactttattgtgttttcttgagtgtaaagaaagaataaatcaaagttcttcatacccattttgacaaagtggaacagtggagctgttttttgcttttgtttttatttattttttgccactggtgatgatagatttcaaaaaacaaaaggtggcagcagcacaatgttcatggtgaattatctcatagtatctagattgatcaagatctgacagaaggaatgcacaaaggattctatattcttaatgatttattaattaccaggatccttttctaaattgaatgtacttttgaattactaggtttcttctttttttttgttctgcaatagtgaaagaaaactcagtagtttagtttcagtttctcatggaaattggtaaatgttagttttgacttcatctattttttatttgtttttattagcgtagagtaggaagtctcatattctactgttctatctaggatggtgaaattccaaaggtgcctaacttgagtaagggatttgtgacaagatagtacacattactataagggctattatttcctgaactggatgtccctaaaagcaaataaactgcccactatctctactctagtgctctctttgtccttatcaacatatacctccaataagtaattacataattcaccgttaaacatggacccactctaggtaaaattaccctcatggaaacattttcactgtgagaatgatgaatttaaaaattatgtttgaatcacctaaaatgtatgtgcagcttctagatggccccttagatctgctgggctctagctgtgtactttaaaaaaacaaaaacagctttattgatatataatttacatattatgtaatttacccacttttaagtatctaattcagtgnnnnnnnnnnnnnnnnnnnnnnnnnnnnnnnnnnnnnnnnnnnnnnnnnnnnnnnnnnnnnnnnnnnnnnnnnnnnnnccttttgtcttttttgcagactcatacctaacacaaatctaaagtttatcactgttgccaggataattacagcaggttatgtttggtttcatttttaagagtggaggtgttcatgattctaagctcaggaatcttgtgatcatgtattaaatatgttatctcatactataatgataaaaaagcttaatgatgtgggttgggatggatattaacataaataattgagtccgctgcttctatagcaatgctgtaggatagaacaataatgtaagtgatatatgtaattaaaaaattctagaagccacattaaaaaataaaataaacagctgaagttaattttaatattttatttaactccactacatccaaaatgttatcattttaacatgtaattgatgtaaagatttattctgatagtttgtactatttcttgtactaattttttgaaatctggtatgcattttacaaatttgggcaagccacattttaagtgctcattagccacatgaggccagtggatactgtattgaatagcacagtcctatagcatatttattaatttgtcttgtagtaagatgaaatagacaataatacggaataatatcttaaatggaaatctttgttagtctctagagccttcattgcttgataaataggacatctaaactttagatataaatcagttgtcaatgagataaaattattgccagcaaatattttccttcaaagataagtaacttttgatatggcagttggtgaaatgaaagaatataatctgccttcttgttaaatggttgactattctgtagcttgtaggtagtacgtattagaaacttgtgtatgtgggaaatatttggcataatactgttttcagtatatagtagctattttttaaggaaattagtttcatacaagaaaaagattattataaaagtgatacttttgcatgaaatattagtttgtgttgataactcttagttaacccttaaagtttaaaacagtactcaaaaaaaaataatgagaatctagtattctgtagttaactaatctataagataaattgctaaagtactagggagcttgtaaatcttaaaaatctttttatttcagtgttcattcaggttggatatatttgaaattgtagatttctatctgtacaacatctcctagttaatagaatttttttccttcccctcccttctctctcctcctccttttctaaccaaagggcattttatcaacaatcatgctgaattcaattaatatctcaagctaaaaaactatgtaattgaggttgtatctggagaagatgggaaaacattgtataatttaagcccttaattgtctgttgagcttttagggctgagtaattgcctttcatacaaataaaagctttaactcttttctcaagagtgtaccaccgtccttagaatcaggtgttttaaatccagtttcttttaattaaatgggactgtagtgatccctaccctgtagagaaatcaacagaactagagaagctaagggcttgatcaggtttcccctagaacctgtgttgcctgcctgctgtatcttccatgtctttcttattcaacttctagaagtagagaaggttgggacttgagtgtagaagaaacatcagaataatttcaaaaaacaggaagttggaactataatttttaaattattgtattgtttttacggattttacatgtatagttaaatattaaaattcatctcttgcagttcaataaaagctatagtatagattttatttttaagaagtttatataattcttttgtgaaccaatatgtaaaactagaatatttattaaactaataatatgtattagtatcaataaaatatgtatttatttttaaattggtatgaaacaaaataaaaatttgtagacactcttaaaattggtcattgatattatctttgtaatttaacattaagtactatttagtgtcatatgcctgaatttaaaggatggaatttaacctcccggaatcttaccaaaggggaattttaacccggga

SEQ ID NO: 1328 - protein, 45 aa, Homo sapien
WLSHSPLSLPSVGIISVSTMPGPNLKCGIQLVSKTYLETLKSISL

SEQ ID NO: 1329 - DNA, 2114 bp, Homo sapien
cgctggcgttccgcgcacgccggctcactgcgcctgcccggcgtgtggacgcacacgctcccggaagtgggaggtggccgctggagtttgtgtggccgccgccgcgggaacgcgagcccggtaatttttcaacggagaaaggcgaggctttcgggctctgcagagtgagagttagcaagtgtccggctccagcaactctcctctggcgtgacagccggcatggaggatccacagagtaaagagcctgccggcgaggccgtggctcccgcgctgctggagtcgccgcggccggagggcggggaggagccgccgcgtcccagtcccgaggaaactcaacagtgtaaatttgatggccaggagacaaaaggatccaagttcattacctccagtgcgagtgacttcagtgacccggtttacaaagagattgccattacgaatggctgtattaatagaatgagtaaggaagaactcagagctaagctttcagaattcaagcttgaaactagaggagtaaaggatgttctaaagaagagactgaaaaactattataagaagcagaagctgatagctgaaagagagcaattttgctgacagttattatgactacatttgtattattgactttgaagccacttgtgaagaaggaaacccaccggagtttgtacatgaaataattgaatttccggttgtataactgaatacgcatactttagaaatagaagacacgtttcagcagtatgtaagaccagagattaacacacagctgtctgatttctgcatcagtctaactggaattactcaggatcaggtagacagagctgataccttccctcaggtactaaaaaaagtaattgactggatgaaattgaaggaattaggaacaaagtataaatactcacttttaacagatggttcttgggatatgagtaagttcttgaacattcagtgtcaactcagcaggctcaaataccctccttttgcgaaaaagtggatcaatattcggaagtcatatggaaatttttacaaggttcctagaagccaaaccaaactgacaataatgcttgaaaaattaggaatggattatgatgggcggcctcactgtggtcttgatgactctaagaatatcgcccgaatagcagttcgaatgcttcaggatgggtgtgaactccgaatcaacgagaaaatgcatgcaggacagctaatgagtgtgtcctcttccttaccaatagagggcactccaccaccacaaatgccacattttagaaagtaacaacagttttgtgtgtggatcattccaattgaagttgctatgaagagggagaagtttctgccttggattgaaacaaaaaaacacaggcgtcacaagcatgttacctattaagagagagagggtatctctgaagactaattaaaatggtaatttttaaaaagatgtgaccagttgacttttagtatatcatcccaagtattatccccaaaatgataatgcaaaacagaataatttggagaccaggagaaaaactggtatgattactggggaggggaagaagcacaggtggtcaagataataatgcatgtttggcctcagctgtagttgccaaagaaactacctgcctcacagatgagcacgcacgggtgcattgtcaaagtctgagaaggatgtattgtactttgaaggaagactttccatttctaagctaccatggagaagtatatgctcctcgagaccagagactgtgacttctgcatctttgattccagcgacatatgataaaatgttttgcacatagttgaatccagcgttgatacatgaaggacagcattacatctttttttctattatacttagaaatttcctctttgttctgcaccaccaacctgtatatcaagcctccttgccccacaaagcttccaaagcccgtaaatttgttaatctagagcaggggtcagcaaactaccacccatgggccaaatctggcctgctgcctatttttgtatggcctacaaactatggtttttatattcccttttgttaatggctcaaaataatattttgtataatatgaaaattacgaaattttagtttctctaaataaagttttggaaagaaaaaa

SEQ ID NO: 1330 - protein, 136 aa, Homo sapien
MKLKELGTKYKYSLLTDGSWDMSKFLNIQCQLSRLKYPPFAKKWINIRKSYGNFYKVPRSQTKLTIMLEKLGMDYDGRPHCGLDDSKNIARIAVRMLQDGCELRINEKMHAGQLMSVSSSLPIEGTPPPQMPHFRK

SEQ ID NO: 1331 - DNA, 1506 bp, Homo sapien
ggcacgagggaatggcggcggctgcggactcgttctcaggcggccccgcgggggtgcggcttccgaggtcgccgccactcaaggtgctggcggagcagctgcggcgcgacgcggagggcggcccgggcgcgtggcggctgtcacgggcggcggcgggccgcgggccgctggacctggcggccgtgtggatgcagggcagggtagtgatggcggaccgcggcgaggctcggctgagggacccgagcggggacttctcggtccgcggcctggagcgggtgccgcgcgggcggccctgtctagtcccaggaaagtatgtgatggtgatgggagtggttcaggcctgcagccctgagccctgcctgcaggctgtgaagatgacagacctttctgataatcccatccatgaaagtatgtgggaactggaggtagaagatttacacaggaatattccttagagtatgttggaactgtcgttaaaaacaaccaaaatcccgaaactatttagaagcttataatgatgtgggtttcatggacacttttcaatgcgtatttttcaaatgcttctcagagagccttgctttggttgaccaaggagtccggatgtaggaatgtttaaatcctcggatacttcagtgacacagcctctgctgccccttgctttgcctgtgtttgctgatgaaaagcagatgcttgtgtttcattttccttcctggtttgtgtgtgttaattctctctctctctctcagacacagaagtctcatgttgcattttccaaattttatgagtgatgatactttttccattactgctgcgtccctgttttacaatgcaaaatttaagtacggtcattgcccatggtgattaaagtgtggttatgggcaggaagacagactgtgtaaaaaaggaatgacatcctggctcctcatcttcttcatcagcaactaccataaccagtttgcgagtcaaatggcatttcctaacggcaggcatggcggcccctgaaagacaacagctccctttctgcttcggacaccactcaaacatttagacgcagctctatcccttttcctagctagagaaggtgatgccttcttccattactcagagatgttgagacgttttcagaatttcttgttgaaatgaaaaacatcaagataaaggacgcctttcaggcattagctaaacttccacttcataactttcggcgagacgtggtgagcctcctggtgtagagttcttttgtctttgtatggaatgactttttgctgtgatggttttgaatgttgggtttctgctgtctgcttagtacccatgcctgaattttttgagattgtaaatatcaaaggagttagattgtgtcctgacatggttgtagactttcacctggattattgatattctacctctaataaatttttaataggcaaaaaaaaaaaaaaaaaaaaaaaaaaaaaaaaaaaaaaaaaaaaaaaaaaaaaaaaaaaaaaaaaaaaaaaaaaaaaaaaa

SEQ ID NO: 1332 - DNA, 4356 bp, Homo sapien
ggcggagccgcctcggacgataaggaaattgagatttggagaagttaaataaccaagacttcacagacaaagtctcactccttttgcccaggccggtgtgcattggggtaatctcggctgactgcaacctccgtcccctccgagttcaagtgattctcctgcctcaacctcccgagtagctgggattacaggcaaagccatgactacagtagtggtacatgtggactccaaagctgagctcactaccctgctggagcagtgggaaaaggaacatggcagtgggcaggacatggtacctatccttaccaggatgtctcaattgattgaaaaagaaactgaagagtatcgtaaaggggatccagacccatttgatgatcgacatcctggtcgagctgatccagagtgtatgctgggccacttgctgagaatactcttcaagaatgatgatttcatgaatgcactggtgaatgcatatgtgatgacaagccgagagccccctttaaacactgcagcttgcagactcctattagacatcatgccagggctggaaactgctgtcgtctttcaagaaaaggagggaattgtcgagaatcttttcaaatgggcccgagaggccgatcaaccattgaggacatattctactggactgttaggaggtgctatggaaaatcaagacattgctgccaactatagagatgaaaattcacagctggtggcaatagtgcttcgaagactgagggagctacagctacaggaagtggctttgcggcaggaaaacaagcgtcccagtccacggaagctctcttctgaaccccttttgcctctggatgaggaggctgtggatatggactatggtgacatggctgtagatgatgctgaaattcagaagtcagcacttcagattatcatcaattgtgtgtgtggcccagataaccgaatatccagtattggtaaatttatctctggtactcctcggagaaagctgcctcagaaccctaaaagcagtgagcacaccctggccaagatgtggaatgtggttcagtccaacaacggcatcaaggtgctcctgtccttactgtccattaagatgcccatcacagatgcagaccaaatccgggccctggcctgcaaagccctagtgggcctgtctcgcagtagcactgtccggcagatcatcagtaaactgccccttttcagcagctgccagatccagcagctgatgaaggagcctgtgctgcaggacaagcgcagtgaccatgtcaagttctgcaagtatgctgctgaactcattgaacgggtgtcaggaaaaccacttctcattggcactgatgtttccctagcacgactgcagaaagcagatgttgttgcccagtcaaggatctccttccctgagaaagagctgcttttgttgatacgaaaccatcttatttctaaagggcttggagaaacagcaaccgtgctgacaaaagaggctgacctgcccatgactgctgcctcccattcttctgcctttaccccagtcactgctgctgcttctcctgtctctctaccccgaacccctcgtatcgctaatggcattgcaactcgtctgggcagccatgctgctgtgggtgcctctgcgccttctgcccctactgctcatcctcagccacggcccccccagggtccgctagctctgcccggcccatcttatgcaggcaactcccctttgattggtagaatcagttttatcagagagaggccatcaccctgcaatggcaggaaaatcagagtgttgcggcagaagtcggaccatggtgcctacagccaaagcccagccataaaaaaacagctggacagacatcttccttccccacctacgctggacagtataatcacagagtatcttagagaacaacatgctcgctgcaagaatccagttgccacctgcccacctttctccctctttactcctcaccaatgtcctgagccaaaacagaggcggcaagcgccaataaactttacgtcaaggctaaaccgcagggcatcatttccaaagtatggaggggtggatggcggatgctttgataggcaccttatctttagcagattccgtcctatttcagtgttccgggaagccaatgaagatgagagtggcttcacctgctgtgcattctcagcacgggagcggttcctgatgcttggcacctgcacagggcagctgaagctctataatgtgtttagtggacaggaggaggccagctataactgtcacaactcagccatcacacatcttgaaccttccagggatgggtccttgctgctgacatctgctacttggagccagcctttgtctgcactttggggaatgaagtcagtatttgatatgaagcattccttcacagaagatcactatgttgagttcagtaagcactcccaggatcgggtcatcggcacaaaaggagacattgcccacatttatgatattcagactggcaacaagctgttgactctgtttaacccagatcttgccaacaactacaagaggaactgtgccacctttaatcctacagatgatcttgtcttaaatgatggcgtcctctgggatgtccgctctgcacaggccatccacaagtttgacaagttcaatatgaacatcagtggtgttttccatccaaatggactggaggtgatcattaatactgagatttgggaccttcgaacttttcatcttttgcatactgttcccgctctggatcagtgtcgcgtggtgttcaatcacacgggaacagtgatgtatggagctatgttgcaggcagatgatgaagatgacttaatggaagagaggatgaaaagcccctttgggtcatccttccgaacatttaatgcaactgactacaaacctatagcaaccattgatgtgaaacggaacatctttgacctgtgtacagacaccaaagactgctatcttgctgtcattgagaatcaaggcagcatggatgccctgaacatggacacagtatgcaggctgtatgaagtgggcaggcagcgtctggcagaggatgaggatgaagaggaggaccaggaagaggaagaacaggaggaagaagatgatgatgaagatgatgatgacaccgatgatttagatgagcttgacactgaccagttgctggaggcggagttggaggaggacgacaataatgagaacgcaggggaagatggggacaatgacttctctccctctgatgaggagctagcaaaccttctagaggagggagaggacggggaggatgaagactctgatgcagatgaggaggtggaactgatcctgggggacactgacagctctgacaactctgatttggaagatgacatcatcttatctctgaatgagtgaggagccatcactgcttggaagagattcttggcaggcgagaaactgagtcaaatgaattcagaacatattcccttctctttctcccagggctgtctgtcttttaaggagctgcatgccctgcattcagaagattatggcttagagagcctcattggcacccgagggtccttccagaatcaataaccaccacaaaaatgacaacagggactaggccctactctgcaccccccacatccaccccccaccatttcctaggatggacatatctttcaaggggaaaaaaaaaccatgtctctggggtatttcacaatatattttctttgtatagtgttctttacttaaagaacaagaaatagttttttataaaactttaaaaaggaaaaaaaaacaggcatttataactgagggtatgaacttatatccaccaggtctcttgtccctgcacttcattttctttggaagaaaatgatgtctaaagaacaatatagaggcatttttacatacgtatttaaatgaaaaggaaaatcgtggtttcttaaattgataaggattaagaatattttattataaatataatatatgattttttaacctgttttgttgcctcatatgctgtcaggttaatttgttttccttcgtgccagaggtggggaggaaggcactctgtctgctgggtaaatgcctaaattcactcaccttcatggtttgggggcagcatggtcattgtggatattggttttgtggagttgagggaacttaggatataagttcactccctctatttttctttgtgattcagtttttcaaaaatctttttttcttccctttctccccattgtggaaattacaaatcaaaggcctttttctttaatgtaaagtgtatttatttaaaaaaaatacaaaataaactacaagtctgtctttgttaaaaaaaaaaaaaaaaaaaaaaaaaaaaaaaaaaaaaaaaaaaaaaaaaaaaa

SEQ ID NO: 1333 - protein, 1058 aa, Homo sapien
MTTVVVHVDSKAELTTLLEQWEKEHGSGQDMVPILTRMSQLIEKETEEYRKGDPDPFDDRHPGRADPECMLGHLLRILFKNDDFMNALVNAYVMTSREPPLNTAACRLLLDIMPGLETAVVFQEKEGIVENLFKWAREADQPLRTYSTGLLGGAMENQDIAANYRDENSQLVAIVLRRLRELQLQEVALRQENKRPSPRKLSSEPLLPLDEEAVDMDYGDMAVDDAEIQKSALQIIINCVCGPDNRISSIGKFISGTPRRKLPQNPKSSEHTLAKMWNVVQSNNGIKVLLSLLSIKMPITDADQIRALACKALVGLSRSSTVRQIISKLPLFSSCQIQQLMKEPVLQDKRSDHVKFCKYAAELIERVSGKPLLIGTDVSLARLQKADVVAQSRISFPEKELLLLIRNHLISKGLGETATVLTKEADLPMTAASHSSAFTPVTAAASPVSLPRTPRIANGIATRLGSHAAVGASAPSAPTAHPQPRPPQGPLALPGPSYAGNSPLIGRISFIRERPSPCNGRKIRVLRQKSDHGAYSQSPAIKKQLDRHLPSPPTLDSIITEYLREQHARCKNPVATCPPFSLFTPHQCPEPKQRRQAPINFTSRLNRRASFPKYGGVDGGCFDRHLIFSRFRPISVFREANEDESGFTCCAFSARERFLMLGTCTGQLKLYNVFSGQEEASYNCHNSAITHLEPSRDGSLLLTSATWSQPLSALWGMKSVFDMKHSFTEDHYVEFSKHSQDRVIGTKGDIAHIYDIQTGNKLLTLFNPDLANNYKRNCATFNPTDDLVLNDGVLWDVRSAQAIHKFDKFNMNISGVFHPNGLEVIINTEIWDLRTFHLLHTVPALDQCRVVFNHTGTVMYGAMLQADDEDDLMEERMKSPFGSSFRTFNATDYKPIATIDVKRNIFDLCTDTKDCYLAVIENQGSMDALNMDTVCRLYEVGRQRLAEDEDEEEDQEEEEQEEEDDDEDDDDTDDLDELDTDQLLEAELEEDDNNENAGEDGDNDFSPSDEELANLLEEGEDGEDEDSDADEEVELILGDTDSSDNSDLEDDIILSLNE

SEQ ID NO: 1334 - DNA, 2614 bp, Homo sapien
  Unsure 1675-1739: Unknown base
cacacacacacacacgccaggagcaagggagctttcgggccacactcccagacgcctccctgagccctggaacccggactcgttgctcctggccttccatacaacatacgagcacatcctgcggtcccaccccagatcccctcctcctcgccatcccattctgccccctccccaccctgggtacagaaagggactgaagtgttgggcagagagggggcttaaggcccctgggcacaggctgggatcagggcagtgagcgaagggcagctgtgtcctgccctcccttctggaggctggaggggagaggccaagcccttggaaaatgtagcaaatgtctggatgtcgcataagtgcgtgtatgtgcgggacaggccccgagaagctagtgactcctgcacacccccattgcacaaatgaaatcacagcccaggagggagggtagcttggcactggctgagaaatagagctctctccccgcccctccccctaaccacaagggattgtcctgacaacttgtggggatagaagggctcacagggcaggggtctcagctgcccccatccttagggcaggggagttagtgtggagccgagagcaggtcccagctccccctgccagccgcactgtcccaggcccagggacctctgccgggtcctcccagcccttgccacacagcctagacgtagtagcctgggcttccagcaggtggcgagctggttcgtgctggaaatttctcctgggtttcttggggtcaaacatgccaacctccaagaccccatcctcacgtctcccacttttctggcgctggagtgtgcagggcgtaggacctgcatgtgtgggtgtgagaatgggggcggtggacaccaaggggcgagtgtgtgactaggtgtgtgtgcacatgtgtagggtgcagacgcatgggtgccatcctttgcgttcagtgactgtgcgtccagacccctcaccagcggcccccccaccacaccctggtcctcccaggcagctgtcccagggcgcccaggcctgccttgcaccacagccctcaggaaatccggcaaggaggcccctgcaggttggttcaggcccccaggtagcaaaacagagacaacagcagccccgcctgaccccctgcccctctctgtggaggcccgggacccccgcaataagcaccacatgggtgaggctgtccctgtcagggtcccctgccagggtccctcctggggttctgggccatttgaggggctctttgatgggccaggccggccagagtgaactccgagcactttctggctggtgccccaacctctccactccccactcattcccaccttgaaaaagggctataggtcccctgccctgcccgggtccagtttacaaacagtgtggggtggccccagggcctggccccactctccctgctgtgcccactcctctccagactccacctccccagtgggtatgggccctccacatgccaggtaagtagcaaacccccactccctccaaggaccaggtctcagagaaggccctggtcactgcccccggcccacctggagcccatcggggctgcctctcccagccgcgacttctccttttgccttaggcctcgcgacatcctgatctctcctgcaataactaggaatcgagattccacagtagacgtcccttgccgtgnnnnnnnnnnnnnnnnnnnnnnnnnnnnnnnnnnnnnnnnnnnnnnnnnnnnnnnnnnnnnnnnnctctctttctctctctccctctctctgttaagatcctgttcgggagtttccccagccgttgtagtatctagtatgttagagttgggaggggaccatagttatgtagcccagccccctcattcccagaggcacccagagggccagcctccagcctgaccccagagcagaaccggaacaccaggttggggccctggtgctgccacctcctctgctggtcgggctgggaccctttgccccttaggagaggtgttggtcacagatgtttacctcagtttatgtcactgtcgaagaaacaaaaaataatagcaaaaaataacactgtagacatgaagacttagaagacaaaaaaaaaaaaattcacacaaaaaatctcccttgttgcgattcttctgtgaaggtacagtgtgtatgtgtgttgtgtgtatgtgtgtgcgtgtctctgtcccagaccctgtgtcccccacactgccccctgtccttcggtgcttcccagagacccctctgagctggcctgtggggcacgggaagccccctggatgggaggcggggccacaggtcggctagagggtctccaccaggcccactgaacagaaccccacggctgccagaatgttccctgagcccacactgtggccagtgggacagtcctggtggctgacatcagcgtccatgcttggctcagggcctggggcggggtcctgggtagagtcctagccccagagccccagcccctcatgtcttgccgcccttcctccatgtgtttgtaaatactctggcatcctttggccctgagaaggtttttaaatgtgttatttacttctctaaacatgacgattgctataaaaataaacaaaagtttagaaaaatgtaaaaaa

SEQ ID NO: 1335 - protein, 84 aa, Homo sapien [sequence omitted]

SEQ ID NO: 1336 - DNA, 2274 bp, Homo sapien
cggacgcgtgggcaagtaattagaagtaatccttcatttaacatccccactgggtgcctcgaggtatttcctgaagccgaatggtcccagggtgttcagggaaccttacgaattaagaaatacttgactgtggagcaaataatgacctgtgtggcagacacgtgcaggcgcttctttgataggggctattctccaaaggatgttgctgtgcttgtcagcaccgcaaaagaagtggagcactataagtatgagctcttgaaagcaatgaggaagaaaagggtggtgcagctcagtgatgcatgtgatatgttgggtgatcacattgtgttggacagtgttcggcgattctcaggcctggaaaggagcatagtgtttgggatccatccaaggacagctgacccagctatcttacccaatgttctgatctgtctggcttccagggcaaaacaacacctgtatatttttccgtggggtggccattaggaagaactccaaatcaaaatgctatgtaaatgtctatgggtgacagtctgctgatggtagaaacctttctttttagttcacaagtcagagatttggacggagctgacacaaagagtttggagctcccccatttctggctctcctttcaggggttccttccccaacccttttcagcagcggtggctgccccccattctgacccctgactcttccagccagaaagatggtggttttctaaaggaactttagctgtcctgcacaatgccgatctgtgtcttgcattttgggtaaaagccataaaaataagaaactcagcctgtggcctttctttcttccaaggctgggcttctttttttaagtgacttcatgcagtttgttgcttttaaaaatttgtccagaatcgttttctgcagaagcatggtctgttaggagcttactggccgtagcagaagcaattgtttcctgaattcttgacatttatctttgctgtattcatttagggcttgggagagtccgaagataattcagtcactgtcagattaataattttgtcaggacaaagaataccgttatgattatttaatcctttaaaattgtggtctccagagcttgttctcagaatggcccagaccaagccttaattgtgatagtgaatattaatggtcactttaaggagaaattataggccaagatgaaatgaacataaacctgtttgccctggctttcagtggaagatgatattagagaccaaaatctggttctgaaggtgtgtatcagccctaaggtgaaccagacttgggaaagattgtctttaaaaatcaatgagtttatgttttaacttctcagcttagttctatgcattgctctataacacacctagttaagttttatgttattcttgaactgtgattttttttctatttactttcatggtttggtgggccattgttatggactgaatgtttgtgtcccacccttcacccccaaattcccgtgttgaagccccaacctgcactgtggagctggggctgctaaggaagtaattaaggttacatgaagtcatggtggggctctgatctgctaaggttggtgtccttatagggagagaccccagagagcttgttccctccctccctgtgcatgcaaacaagagggcatgggagcacacagagagatggcagccacctacaagccaagaggagaagcctcacaatcaaactctcgctgctggcgagagtcttggactctgtcttggacttccagcctccagactgtgagaaacaaatttctgttgtttcagcttctcagtctctggtgttttgttattgcagcctgagaacacagctgtacgattatttgtcaaacagaaaacactgatacttaacaatgctaatgcaattatttatttgcttttcagtctctacaaaacgttctaaaacactaatctaaatattaacagtaaaatatttgcataactaatggaaactaagaaatcatatgaccaatatttcacttattggtaatcttactctactgatttccccccagactgtgatttttgaacttccttgcctttctcctgtctttctgtgtttattcatggaattccagttatctgggcttgaaattgcaggctctcctaacttaagcaaaatctgacagatcagcaaaatgagataaatgtttcttttttctttctgactgcattaaatcagatacaactcagcattaaaaagctatctttgtaaatgttgttactaataaattagtcttataaaaaaaaaaaaaaaa

SEQ ID NO: 1337 - protein, 160 aa, Homo sapien
RTRGQVIRSNPSFNIPTGCLEVFPEAEWSQGVQGTLRIKKYLTVEQIMTCVADTCRRFFDRGYSPKDVAVLVSTAKEVEHYKYELLKAMRKKRVVQLSDACDMLGDHIVLDSVRRFSGLERSIVFGIHPRTADPAILPNVLICLASRAKQHLYIFPWGGH

SEQ ID NO: 1338 - DNA, 3226 bp, Homo sapien
ggcaggaatttcggtagaactggagtgacctgtggaactgctttagaatctaacctgctgtcttcgtgctctgtgtgaaggggaagctggggggttagcatgaagtctggccttgtgtgcattggagcttccaaggcactttgaaatcattccagtatatttgggaagaattgagtgaatgagaatgctcttccttattctggtagatttgacttgtttataattctgcactttagaagaaaaacagtgttaatctgtagttgaaagaaagcttagtagatgagagagttctaggctactgtggctttttccagtagatttagatgagattatgtgttttgaaatgttttgtgggatcccttagaaagcatcacttcagggcagagacactcaatattgccagccagcttgggttctaaagtgatttaatcaaattcatgctcctgatcttttttttcccccttcctttggctatgaaaacccaaagcccggagtgattgttttctccttgctttaagcagtgaagttatcctaatgcaaaagagcttagtagaaaatgagtggtttacctttttttctaaaagtatattttcaagtttattctggaatgtgatgtcttggtcctcttaaaagcagatcagccatgactgaaactcaaggcttagctggtatctatgttgtgctacattaggtgactagaagccacttcttagtgtaatcagctcctgtttccctgtgagccttagttatattttaattcagtggctttgagtcaaggccggttctaattgaggggacccagtgtgcttcagtgttaagagtggggcaatgaagagtgaaccccaatgaagagtgatcccaactttggaaactatctggtcattcatgaccttaaaaagctgccatggtggtcaaatggcatgtgtttgcacaaaaatgaccgatgtgtttaaccaaagctttgaaatgtgatgaagccaccaacataagcacttgcctaacagaaatcagtatttcttctacttagaaggcttggggcccagggtaatgaggcaccagatgaagataagatctgcatcaaggaattaaatttccagtttgtccttggggttctttctgcttatgttttttcccccccatctggtaatagtcctcttctgagaatgaaaggaggcacagaagttgcgagaaagacccagtccccagtctttgccaccattgcaccatggttgtctcggagtcccttcacctgacctttttagtcagctcagatctttttgtagtttgagaatagacctattcaagagctatcagggttaaaagctgcactgaccaaagctgtacttttaaaacacaacccctgggctagtgatgtctctacttgctctatgagccttttgccagcctcagaataggcgaggtaaccttgaatttcagggccctggaaactctagctgaaacctgcctttcctaatgctcacacaagcaccaggtaccctgagcttatactgagtccagtggttcctatttatgtgtgtgtgtatgtgtgtgtgttgagtaacatgaaacttggcagtagcagagagcactgaagttcacatgcaagttctaatctaaagttaagcagtctcttatttgtttcgggactctgatttgactctttttctgatgctttcggcatgtctgcagcctgttctcctagcctgctgcttggagtcaggttgagcatcagtgagatgaagacagtaccttttcctctcacattggcagaatagcacgcactagatgcctgaccttgagctctagtctcccctttaaatcttaccttggcagtaacacattattcctcattcaataatttcaatgctgaaactgaactctattactaatgccttccaatcagagttcctgatggggatgcctgtgggatggcccacacctgggggacctggcagatggggtgagttgggtaaggaagatgatgcttagttcctgatagatgctacagatgtagtttggcatttcagtttttgtccagtttgattttcactggggtttgagtcacagcaagctgtgtatgaacttgtgttttgtggtgacacattaataatcaaattgctaaaaccctgaatctgcttattcttcagcttcacctctgcactaaccccttacccttatggtacgtcaggattttaactagtactgctttgttgactttgggaaatggtgccactcaaaagcaacttcctaacttgaggaataactcctttgtagtttactttctggtactggttggtgccttgtattgggatacagctatattcttagctcaaatgtcctctttttgagagcaaagtagttatccaatggtgagacgagaccctgacgctcatagaggccattccttcctgggtgtcggaccagggctctgtgtcagggaaaaccttctgggtggactttgtaagaatccagtttccaaggttagattcacatccttaatcttgcagagactagaatttcacagctcgctttggaacatattccaattcaaccagttaaaatcagaggaccaagtcgtgggggaggggggcggtgttgaggagaggtatttttaaagatctggcaacttttcaggattatttgtggagaactctaaggttaagatcaggaaataaaagactgtgtgtgtgggtgtgtgcgtgtgtgtgttcaagtgcctaaatcttgtttacctatcactttaaaaaaataattgaagtgtaagctaaataaaatgcttggagttttgcctgggctagtgagagttggtgcaaattcttgtgtgtgtttgcataggaaggtgagatgaccatctactaaagaggaagtagctaaatacagatctgtgggtgtttttaaaaaaactcaacctatctggtgttttattttaatggataaaaatgtaatttttctaaggtagcaacttatttccaaattaatatagatgaaaaatagataccaattagactaaattgaaagctttttgttctatatttgcatagcctttgaaatatttcttagtgcctaggaggtctggggattcctctttcgtggtggtcactaaccttacttgatgcagataaaatcacttgtcaatgcaaaatgtgttagaacttgataaagctttgagtttgagaaataaaggtatatttaaaatttaaataaaacttgtcatttatgctcattg

SEQ ID NO: 1339 - protein, 25 aa, Homo sapien
GRNFGRTGVTCGTALESNLLSSCSV

SEQ ID NO: 1340 - DNA, 568 bp, Homo sapien
cccacgcgtccgccgggcgcgttccgttggcggcggattcgaacgttcggactgaggtttttctgcctgaagaagcgtcatacggaccggattgttttcgctggcccagtgtccccggagcttgtgtgcgatacagagagcacctcggaagctgaggcagctggtacttgacagagaggatggcgctgtcgaccatagtctcccagaggaagcagataaagcggaaggctccccgtggctttctaaagcgagtcttcaagcgaaagaagcctcaacttcgtctggagaaaagtggtgacttattggtccatctgaactgtttactgtttgttcatcgattagcagaagagtccaggacaaacgcttgtgcgagtaaatgtagagtcattaacaaggagcatgtactggccgcagcaaaggtaattctaaagaagagcagaggttagaagtcaaagaacatattcttgaaagttatgatgcattcttttgggtggtaacagatcataaagacattttttacacatcagttaatatgggattattaaatattggctataagtgaaaaaaa

SEQ ID NO: 1341 - protein, 88 aa, Homo sapien
MALSTIVSQRKQIKRKAPRGFLKRVFKRKKPQLRLEKSGDLLVHLNCLLFVHRLAEESRTNACASKCRVINKEHVLAAAKVILKKSRG

SEQ ID NO: 1342 - DNA, 5277 bp, Homo sapien
gtgggccgcggcggtggcggagactgtggctttaagagcgtgccgggagcccgagccccagccgggccgcgcttcgccgctgcgcaccccagcggagccaagccccacgctggccggacagggccgcctgtcgccgggctgctgagaactagccctagacctctgcgtgagggttcttctgccgaagacatcaccagtgtgtggagcctgccacacccacccgctgccaaaccacggcctttacctgtgtcttccggtgtttcccgtgcgacccatcctgtgggagtgcctcgtgggctgccccagagttcaccccacactcagcagcaccaatggtgaagatgacaagatcgaagactttccaggcatatctgccctcctgccaccggacctacagctgcattcactgcagagctcacttggccaatcatgatgaactaatttccaagtcattccaaggaagtcaaggacgagcatacctctttaactcagtagttaatgtgggctgtgggcctgcagaagagcgagtgttgctaacaggactgcatgcagtcgcagacatttactgtgaaaactgcaaaaccactctgggctggaaatacgaacatgcttttgaaagcagccagaaatataaagaaggcaaatacatcattgaactagcacacatgatcaaggacaatggctgggactgattggacagcatctacccaacccagtgtccacgtgaacgccattcaaccgaacattcttcccaagcgtgagagagtgactgacacttggttccatccatttaggggccttgccatccggggcatcctcccaccctgacgccatctttctggtgaccggcctctaaatcgctgtctctctgtctctttgctttgtatctgtttgtgagttgatcctggcttctctctctgttctagttttggctgaaaacaaaacaacaaaaggaacagatccttgaccgcatggcggcagcccaccttggtaagggccccagggcccatgcgagagctgcctgatggcctcttgtcaggagagcagtggcacgggggcgtgaggaagagggaaaggggaaactctaagggtcctggcgcggggaaggggtggaagggtggaggtaggaacaaaattgcgccgctcctggagacctgataacttaggcttgaaataattgacttgtctaaaaggacaaagagaaaaaaaaaatacctcatgactgcattctctctgactagaagcttctgttcctgacaccaaatgtgccaggttagcaaatgagcacaagatgtggccctgattctagttggtggggcaagggcctggttctcctgggctgagtgggggagtgtcctggcagcagcgagtgacctgggcagtggccaggtgggtgcgatgactctgatgcctcactcagtctctgggcaatcatcatctttgcctctagccaccgtagataaggtgtgaagggactgctgtttgcaatgggcttaccatccaaatatcccaaaggctttgaccagcaaccaagtaaaatcagtaattgaggagagcagggcacaaaggggctgcagtttgggagctcctgaagaaatggctcagatattgagtcagagaaataaaaagtaggatcagttagcaattctaactgcccttccttctgacccctcataagaggagtgtggtgagggaggggactgggtaggggtcatcccaggaggaggggtttacattggaaccagttcaggttcggtgcatctttcctcttcggttttacagtggcttccgtgggatcgtcaatttcttgttcttagagtttcgggtgtttttctccagtcttgttactgtagactgtagaaagcacgggccccaggctctgagcttagtaataacctggctggtagattcctcatgcccctaattgtcccacttaggcctgaatgtcttgcatggagagaaatctcctgtcagtgtggtccagcagcagggaggagttctgcccaaattccgatatcaccccttcccccatccaaacatccttcgattagggaagtggagagcacatccctgtaaggcccataagagaaagaggagtttgttacatttaatcaacactgtgaagtctgttctacagcaattcagccattacacagtatatgactgaaactcatttaactgggttaatttcatttcttagactgaatatattattgttaagatacgtgtgcgtgttaggtaattctcagcatctcctccaagtaggccgaccttctcggaaaattcaccctaaaagtctcacaaaagaatgagttcatggggagattctgtaaagtgatgaactgagatgaaagcagccaacagcccaggagcttttcagaatagcgtctgcagcagaaccagtttccattcagagcgcgtccttggtggaaatgcttttttgtgtgtctccacgcgctgatggtggaatgggagccccaagacgtgtgggcttagaaatcaacttttgttccccaaggcttcttgtccagatctttccagtgctttcatagccctgggagatcaagttgttctccccactttactgcaaggtagactgaagttcagaagaaatactgaatttctgctcccagaagaatagtttctctggctcacaggcccaagttctcaatgaaatcgttttttaactttcacattcctaagctggcttcccgtgcacagaagccatggatttcccctctctcccttccccctcctcaaggaaatagtcttcctttatggattttcattggactctttcctcagcgattgtcctggctgtttattgatagtccttcccataagaaaatggggttaaacatggggtaggtattttgtctttcaaactacaaatggaatgtggtgacataaactagacatggggtgccctcaagtttccaaggggaccaatgtgccactgttcttccttggggatgaggcctttgactgttggatggatcagagcaggctccagtcagaccctggttctgaatgttttttttttcggtgactatccagtgagccttcagtgggtgcaaggcgccatacttgctgtgagagagctgagtagagtgttggtttttccataactacagggggaaaaaaagtcattaggctttccctttgtgtcagtgaaaccaaaagtgcttcttacaacgttcgctctgttcatgggttgtctatctaacattgagcagcattggagaggccacagctgagctatggagatgctaaattaactcatggcctcagtcagttcattctttaatttcctcaccaaattattgacttagagcataaccaaagacctcattcattcaccccaggtgggttgggggaattggagtttgttggtgaagtttgggggcggggtgtggggagtagagacagggtaaggggacgtgagaaaggaaaaggcatgaagttctatacctcagccagcagctgccttcgtttggaactgaagtccagccagcagactctctagctccatctcccctgtgccaccctaggtcatatgaccttggccaccttggagtagacccagacccctcgggacccgggacattagtctcaggctgctgatggattgatttgacatgaaccaaacacagccaaactcgatacccacaagctgtcagctgaacctgactgagtgttcttcctgagttcacgaggataggctagagtgcatttttactggtggatcagtgtgtgcgaaagagatgaccctttataaagagattttcaagtggatatatataaaagaaacagttgcttgtaaaatatacttttgtaaataatatttaattttttaaataatatatttggtgctgttttctcagatcccctgagagcactttttattttccttttaaattctatggtttcctttgcatttcttgaagtatattttaagggaaacagtgatcaccaatacatgttttcagttttttttttttaaggtctctatcactttaatctggatcaaggctttgaagcaatgcctctctgcattttttccccagtggaacagactctgcagtacattaatcaggttgagaattgaaatattttcttgcatcagtattggctagaaaagaaaataaataaaaccaagttaatttagtagtaacaacttacagtgattcttcctgttggaagaatttgcaacaaatcagaatcacgtttttagttgtgcgtgtgcgcgcacacgtgtgtaaaaagcactttcgattgtgcctcctgttttctcgagtggggacactttaactacagtttacacctcgggcgcataaagtttttcttctctttctctctggttgtttctgtttctgagtggaccaacagcagaacccacgaggatttgttttgagtatggagctgttgcgggtttgctcctttttcttgctttgcgtgctcagtttttacagactgtaaaggagatgtgttgtttgtgaagatggagcagagtcaaatctgtgcttctaactgagatgagagtgtattaatcacgtatcgcagggctccagctgttttagaagccacatcatgttaaacattaactggtttggattaaaagaacattaatattataatacacatatcttagtggtaaacagctttttttttttaaggtcagattgcctcaggtttagaaagaggctgagaaatcaaatcttgaacacaatcaacttacatattttaaaggaatctgcctcaaatgagaaaatatgctagttatctagatagaggaaagagatatttacttttttaaaaattaaaatagttatgaaatctggcagaaaaggtaaagcctagaagaaactatgaaagctattctcatgttaccaaattctatctgcgcatatgtttttgtataacatttcggtgacagtgggagtcggttccctttcccaacctgcagagactatcttccaatacagaatctgtctatttatgcttgtgtttacaaactgtatttgttgggtttgggtttttgttttctttggtggcatttttcaggtcactttgcttctataacaaaggtaattgttttcaaataatttgtcttcaccttttcctgtatttgtacatagtgattcagtattagagaaaagtgcattgtttctgtcatatttccaatctgtgttggtgctcatttgagaaaataaaagttttcaaatattacaaaaaaatctatgtcgggtgcggagaaagaggtaatgaaatggcagg

SEQ ID NO: 1343 - protein, 112 aa, Homo sapien [sequence omitted]

SEQ ID NO: 1344 - DNA, 3648 bp, Homo sapien
aaaagagacattgtaatgaggcacaccactaaagtgagcatgcccaattaaaaccagtgtaatataggataagaaaatctgatttttcaaaaaagatactctacataaagaatccttcatataaaaagttctttcttgtagtacatttaaagttttaattcactcatgtataactgagagttcctttgagccctttttaggcagggaggcatgtctgtcatctagcgtgtggcccagtaagtgattattacattggaatcagtttttcagtcttttaaaataaattctatgccataagaataaaagataaagagcaaaattaatgttaactatttttagcttattataactatgtcaacaagtgtttattaatacctattatgggaaagtcactgtggttggcattgaaaattacatcatctttaaagcagtatttgtccccagatggactcatcactagcaaagactaggttcattggaaggcatagggtgagagaatgggaagatggagtgraggcgggttgttaaagtgctgtcagtgagtgattttgtctacttgaataatggtccatgtttgggggcatattgtgtttcataagaagtgaaaggtatttgcaaagtaagctacaaatgacccataaatctgttaacaacagtccttaatatgcaaagatgaaaaccaagcattactgctacccaaagggaactggtgcttggtgatgtgcagatggggctgttggttaagagagctattacaggttttctctcttaggtttcataggaggtagttactgagatgagattgttttatctttttgaatacagatctcttgtcttgagttagttctgaggatgggagtaataaaggagttttttgtttttttgtttgtttgtttgttttggctccttagtaatactcctctgacatttatttctattattcttcaaagaaaggaaaccaactgaaatgtttgctttaacaaacattttaataagttctctgggtttttttttccccttttaaaaaaattagcatataccatagcaataaaagaactaatgttaactattgtatgctacaacttaagtgatttttctaaagaagcacaatgtcattgaaagtattattgaaaaggatcatagtcacattgaatttgtgaaggccaaagaaattgaagggagtgatattttcattttatgatattcacattagtaaattttgtgtacaagaataccaggcagagtgttttacccatggaaacaggtttcagattactttgtttttactgttagagtctcaagtttagaaatgctaacacttaaatcagtttttttctcactatacttgaagattgttaatattttgatatcttcctagcttgatgaatttaaacatatcttcagatctgtgacagtgacagccaataggactgataatattagcttcaaaccaataatatccagggttaaaataaaaatcatagtgaaagtacgattgtaaaattatgctatattaacttttaagtctgtaataacttgacatcaaaatgttatgtaattaccataaataatggctagcgagaacatctttggaaattctcaaattacctttcttactacactgtttgcagaatgaatgtagaaatgatcctgttagctttctgaatgttctgtgggttgaatgtgtttttgcttaaataaagcttttggtatttgtttaaattacacttcttgagaagtggaaattttaggatcatctttgctttgtttcagttttgtgatttttgaaatgaatgtttagtttactgagccagttggtcatttcttcctcatgtcgttaagtccagtgagtaagcctgaactgtgaataaattaccaaaaacttgcttagaatttcattttgaagcaatttgctaatatttgaagtgtatacacatttgtagttatgttaaaaattgtattgtactaagaatgtaatcaatgtctactttagttgtaaacatttctgatgtcaaaactttattcattactgttgattttaagaataagaaatcactgcctaaatattaccaaaagccactgtctctacccgaacttcccagtttgggaaagaatcgttagataaaacaaaggctctgccctttctgataccaaactccacagatactttctcacatcttttaaaacattttgcaataacatattgtttataggaagtttacagggtatgcaatgattaaaacttttaagtgaattgatagttgcaaaagaaaggataatatttaaggtcagtgagtagcaagacaatctaaagtttctgtaatatctggctctctgttaattatagagcaaagtttcccttacagaatccttttatgaacagcaagctagagtctatccctagtggttatagcacctgctgcgtttttcaggagacagttaggccagggtgatttgaatggatagatgtgctgttttgcctgcttgtagaattcagcccagtctttggtctctctctctctctccctcctccacctctccctctctcttcttctgcaccagagcctaaggctgcgccaccaagatgcgtcattttttccagaggcttctttttttttttttttgagatggagttttgctctgttgcccaggctggcatgcagtgctgcaatcttggctgactgcaacttccacctcccgtgttcacacgagtcttttgcctcagcctctggattagctgggattacaggcacgtgccaccatgcctagctaatttttgtgtttttagtagagacggggtttcaccatgttggccaggctagtctcaaactcctgaccttaagtgatctgcccgccttggcctcccaaagtgctgggattacaggcatgagtcaccgtgtcctgcccagacatatcaaatttgacaggtattgtataccctttggatctttaggaattaatttttgcctctgtcactcagctttgtatattttgaaatggagataagtatagggaggtcttggaaggaaaattgccagaattcccaaaccatgtaacactcattgagaattccagatccattatatctaaagggcaagtgaaggaaacagtattgtgaactgggtataactccttggttcttaactagtacattcttaatctgtgagacccaaaggttgataaacaataatttaagattgtacagtactctaaacgtctgcaaaggtctagatgttatcagtatcactagtttttatttctgccagtagctcccttttaggttacattgttgtcctctttccagtgtggcatctgtcattggtttttcactatggcaagttcattaaaaagcttgctccattgttatcttcaagtaatgcccataaggagatggaagatatctgagacaattaaggctttagcttctaggcaagagaaataacgttgcattaaatttcaagtttctttctgctagacttgaatgtgtctagccactctaatttatgggggcttttggttttttcctattgtactttgtatgtagaattgttttgaaatatcaagcatatttactttgaatttgaactctttcttaattttgtatttatcctttgaataaaatgtaaatccaaaaaaaaaaaaaaaaaa

SEQ ID NO: 1345 - protein, 20 aa, Homo sapien
MCLATLIYGGFWFFPIVLCM

SEQ ID NO: 1346 - DNA, 3076 bp, Homo sapien
ggttggtgttgtttggcatttttttcttttcctttttaaagaaaatgttttcaggaaacatgaacaaacatactgccaattatagtggggctgggaaggcacaggagctggcgacctctcagctgcatagttgggacggcaaaccctgctgtgagcttctcagacttttcacctacttcacctattaagaagccatgaggagttgtaaactcttgttcagggaagaaaagagggcaggaggaagtaacccaatgcctttaaatacaaaacagatgaaaaacaaaatactcatttttccttttctattgtgggtttggggagccaaaccaagtgtgactgtgagcacgttcactgagaggcatgacaacattattgaagaggtctttccattatgtctggttctcttattttcttaagtcaagccttaactatgaacatactttaagatgatacgggtctgtcaccataaacctgtaaaagggcatcgacagcttttcagataatccaggaatgttgagacatggctaagtttctagctgatacttagtcattccctcttgatattgttgggatgggtagccaaaaggcaggcttgtgggagttaagagccaatgatacctggaaacatgggaggtagctgggggtacaagtggatgttgagactgaaggaagaggtggaaagaagacacagaaggcacccagatgccaaaaggcctggcatgaatgagagttggcatctgtcctgttgtggtgttcccattcttgccatacccatttgcccagattgttctgattctcatgttcaattgactatcccacatgagactacagtttataggcagtgaggaattgtttcttcctgggaaatgtccttccagcaacttcagaggaatgggaaagtgttaatcttacgtgaagcaaaggagcctggactaggggcagagagaaagaagcagcagcccaccttctttgtgtttgcacatgtgcctatgtcgtgtacattggtacctgactgtggctcagatctgcgtcgcagcagcgagagaagaaatcactccatatccgatgagaggaagggtggcacagagatggtgtctacaattagagacatttctgactccaccttagcctaagcaaactttatatactgagtaacatttgaaggttgtcttttaatggtggggggtgttttttcctttttaaactacagtgcttgcacaagagagggagggactcagaaaaggttagggcaggtgagggagacagtagatggcctgggatgacttgagtccatcatactattgcttggcaggtgtcctcccccatgtttgattcaaattccatgagtgacctacctttccccaggaatgggactgagagggtagtctccagcaactcagtctgcacagggctccccgttcaggctgcctttggtggttgtgcttttgtaagtttctttctctgcacttcgacttacctctgaatcagaaagcaagcccagcaggtgaatgagggatgtctgcttggcattgcccaatctaaccagggaggctggctggccacccactgtccgctagaggggagagctagcaggtgttggtatgaactcaggaatagaaacacgaggcctttttaaatacgagggagaagaatccatgatgcatacctgtaaccccctagaacccaagtgccagaattcctagatgctgcttctgtttgaacaaaatgtcactgcttttacacttgaaaaaaacacactcgaaaaatgttcaactccatgaaaaatattttttggctttaagaaattgtttggtgtttaactgtttcctttgattgccattccaccagtaaattgttggttgatttgcactgcactctggggttggggttgggaggggagggtccttatacagagccgaacctggggttgctcaggaagtgggccagggaatgtggaagtcgttgacattgcctgggccaaaagagtgggagatagtttttctcccctcagcccactcctggtagcacctgtcgccagcctggtacaaagccaggcctttttcttctgtgagcatctcatcactgtccagcagcaggtggaaaaagggggacaacaaccagacctattttttctcccccattttttccaaattttgctgtgccaaatgtttaaaattttataaatatgaatctattgaaatttccttaatcaagagcttcttcgtgtaaagtttgcttttttagctatagaaaaagaaaacagtaaatatctcttaatggcatccagccttgctgagctcaccttttttcctgaagaatgggtaggagtgaaatatttaatgtaaacatttcaccaagtccctttaccctaattttgaagctgcattaaacccaactcactaacacagggaatgattgcaccctagtcctctgtgggccaagaaactttcagaagcattaaaaaaatagttgaagtatatcacttctcaccaagtgggtagagtcagttggctgtttgtcccttgttttttatttattccataattatgtttgtgctttttgttttgtaaacagtaatggaacgtacatttttattttgtttagaagacaactttgattcaatctttcaagaactgttccattcttggtttcttcttagggggataaaaagttaccagttaatttgttttgagatatttaagcattctttgagttatagaattgtgatgcagggatttgtgaatgagacatttacatgtgaaaggtgacttcactagttacctgcttgagcagagtaaagtgtgtatatgtacataaaatgtaagtaatcttaactccattgtgcagtgccttttagatgttccgctttctataaagtcttcaaatttttgcatatatattatatatatatgatgtaatgttatagaaatatatgtataatatacatattttttccaggggtatctgatagctctgtattttgttatggaagttgaaagaaaaaagtattttacctcagaaattaaataaaaaaatacttttaagtataaaaaaaaaaaatagcgccgctcgtgat

SEQ ID NO: 1347 - protein, 61 aa, Homo sapien
LVLFGIFFFSFLKKMFSGNMNKHTANYSGAGKAQELATSQLHSWDGKPCCELLRLFTYFTY

SEQ ID NO: 1348 - DNA, 862 bp, Homo sapien
actcggccgggcagccgcgggccgagcgcagccgcctccgccaccgatgcgcctggtggccagactccaagtgggaccggcggacacgcagcctcgcgtgtcaggggaagctgatggagaatcgagctctggatccagggactcgggactcctatggtgccaccagccacctccccaacaagggggccctggcgaaggtcaagaacaacttcaaagacttgatgtccaaactgacggagggccagtatgtgctgtgccggtggacagatggcctgtactacctcgggaagatcaagagggtcagcagctctaagcaaagctgcctcgtgactttcgaagataattccaaatactgggtcctatggaaggacatacagcatgccggtgttccaggagaggagcccaagtgcaacatctgcctagggaagacatcagggccgctgaatgagatcctcatctgcgggaagtgtggcctgggttaccaccagcagtgccacatccccatagcgggcagtgctgaccagcccctgctcacaccttggttctgccgacgctgcatcttcgcactggctgtgcgggtgagccttccatcctccccagtccctgcctctcctgcctcctccagtggggcagaccagagactcccatcacagagtctgagctccaagcagaagggccacacctgggctttggagacagatagcgcctctgccactgtccttggccaggatttgtagactccctgagcctcagtttcctcaactgtaaagtggagatgggtttggtgtcgggaataacgggaccaataaatgatgctttactattaaaaaagaaaaaaaaaaaaaaaaaaaaaaaaaaaaaa

SEQ ID NO: 1349 - protein, 207 aa, Homo sapien
MENRALDPGTRDSYGATSHLPNKGALAKVKNNFKDLMSKLTEGQYVLCRWTDGLYYLGKIKRVSSSKQSCLVTFEDNSKYWVLWKDIQHAGVPGEEPKCNICLGKTSGPLNEILICGKCGLGYHQQCHIPIAGSADQPLLTPWFCRRCIFALAVRVSLPSSPVPASPASSSGADQRLPSQSLSSKQKGHTWALETDSASATVLGQDL

SEQ ID NO: 1350 - DNA, 1004 bp, Homo sapien
gccgaagccgccgtcctgctctcccgcgtgggcttctctaattccattgttttttttagattctctcgggcctagccgtccttggaacccgatattcgggctgggcggttccgcggcctgggcctaggggcttaacagtagcaacagatgcgtcggcggcggcagtagctgttagttgcagcagcaatctcttcccgaacacgagcaccacaggcgcccgaaggccggaacaggcgtttagagaaaatggcagacgatattgatattgaagcaatgcttgaggctccttacaagaaggtgagaaaaaacatgtcggtgaggtttatatatttcttaatttagcattattcacgaaactactgctgaaatgtaaactaacctccccggagccctcttgatttatcttatcagagatgcattacgtgtaacttacaaaagtaaatatatgctattgatgtaataatattgtgcagtagtttcacttcagcgtgatgaataaatgcccatctatctctctttgtagacttgcctaacgatatctcacctctactcccatgaattcacctttgattccagtgtgaactgtcaatcataaggtagtaattgagtgacttatcgctgtaccgtggtcccctaggtaaaatgactcaactaagaattaccacctccagtttggtatagcaaaaaggtgaatgtagtggtttgggaaaaagcaggggtccaagaataacaaagcatgaccagtctgtggcaagttaaatcttctaatagtcttataagaagaaatgggtgagattttaaaatttatgtatctatgtaagactggtgatagtaaatcttaaaacagtccagtggcaatctgctgctcagttaataattactaaaattcttggatccctgaatagaaattaaaaaaaaaaatacaagaggcagtagagtcaatacaagcttaatacaagcttagagtaaatacaagcttagagtcacttgatgactgttttact

SEQ ID NO: 1351 - protein, 41 aa, Homo sapien
PKPPSCSPAWASLIPLFFLDSLGPSRPWNPIFGLGGSAAWA

SEQ ID NO: 1352 - DNA, 4068 bp, Homo sapien
ttagaggtcctttctgctttataacattaggttcttcttgtgaggccttaagcatttgctaaacaggttcaagtaagtttagtaaagtttcattactgccattgattcaattatcaaactgcttttgtacatataaagaattcttcagatgcatggtttctattaacaagatccaatgccttccttttatttccccttcagttcaacatctaatatataaagattgctctgactactacgcaataggcaaaagaagcagtgagacctacagagttacacctgatcccaaaaatagtagctttgaagtttactgtgacatggagaccatggggggaggctggacagtgctgcaggcacgtctcgatgggagcaccaacttcaccagaacatggcaagactacaaagcaggctttggaaacctcagaagggaattttggctggggaacgataaaattcatcttctgaccaagagtaaggaaatgattctgagaatagatcttgaagactttaatggtgtcgaactatatgccttgtatgatcagttttatgtggctaatgagtttctcaaatatcgtttacacgttggtaactataatggcacagctggagatgcattacgtttcaacaaacattacaaccacgatctgaagtttttcaccactccagataaagacaatgatcgatatccttctgggaactgtgggctgtactacagttcaggctggtggtttgatgcatgtctttctgcaaacttaaatggcaaatattatcaccaaaaatacagaggtgtccgtaatgggattttctggggtacctggcctggtgtaagtgaggcacaccctggtggctacaagtcctccttcaaagaggctaagatgatgatcagacccaagcactttaagccataaatcactctgttcattcctccaggtattcgttatctaatagggcaattaattccttcagcactttagaatatgccttgtttcatatttttcatagctaaaaaatgatgtctgacggctaggttcttatgctacacagcatttgaaataaagctgaaaaacaatgcattttaaaggagtcctttgttgttatgctgttatccaatgaacacttgcaagcaattagcaatattgagaattatacattagatttacaattcttttaatttctattgaaactttttctattgcttgtattacttgctgtatttaaaaaataattgttggctgggtgtggtagctcacgcctgtaatcccagcactttggaatgtcaaggcaggcagatcacttgaggtcaggagtttgagaccagcctggccaaacatgtgaaacgctgtctctattaaaaatacaaaaattagccgggcatggtggtacatgcctgtaatcctagctacttgggaggctgaggcaggagaatcgcttgaacctgagaggaagaggttgcagtgagccaagactgagccactgcactccagcatgggtgacagagaaaactctgtctcaaacaaaaaaataataaaatttattcagtaggctggattctacacaaagtaatctgtatttgggccatgatttaagcacatctgaaggtatatcactcttttcaggctataattatttgggtaatcttcattctgagacaaacttaatctatatcatttactttgcaacagaacaaccctacagcattttggttcccagactaagggaactaatatctatataattaaacttgttcatttatcattcatgaaatataaaatacttgtcatttaaaccgtttaaaaatgtggtagcataatgtcaccccaaaaagcattcagaaagcaatgtaactgtgaagaccagggtttaaaggtaattcatttatagtttataactccttagatgtttgatgttgaaaactgctttaacatgaaaattatcttcctctgctctgtgtgaacaatagcttttaatttaagattgctcactactgtactagactactggtaggtttttttggggggggtgggtagggatatgtgggtaatgaagcatttacttacaggctatcatactctgaggccaattttatctccaaagcaataatatcattaagtgattcacttcatagaaggctaagtttctctaggacagatagaaaacatgaattttgaaatatatagaacagtagttaaaatactatatatttcaaccctggctggtagattgcttattttactatcagaaactaaaagatagatttttacccaaacagaagtatctgtaatttttataattcatcaattctggaatgctatatataatatttaaaagactttttaaatgtgtttaatttcatcatcgtaaaaagggatcatctcagagagaacagcagtattctgcgtatttttaaaaatgctctagagtaacatttgaagtaattcactgtagtgtatgccagtcctagaaataatttttttaatttctggtgtctgtttctaatacactaaccaagttttcaaaatatatttacaaagatgcatctttacccattattttaaaatgattaaggaggatagttgcttcaggtaacaagctaatttttcaaatattaggcccttacagaactatttagtcaaaaagtaagatattcctttaaaatatataacccaaagctttcagttaaacatgatatatcacaaatactattaaaatgttaaagagaaatgcaaatagcattaaatgatgaccaaaatgtaaaatattgtagatttcaaaagctgtgtctctattaggtgggataccaaatgtaaatgatgtaactgacgttgttttttactttttactttttaaaaaagactaaaaacgttttgatattatacaatgtatttgtttcagataaggtcattgtcatttagtatatataattaatatatgtacaagtttaagtaaattcctgtgagtaaaaatggacttatcacaaaacatagttctaaagaaaggtatatgctcatatacacggtgtccattaatttaatgggaactaggtataacttcaggagaatttggcaaataattcattaatccatgtaaatattcaaaagcttgttctatccacattatttcaagggatcactttatttttcattatactttcacagcacttttctagtaaattctgtaacacagaaattccattttggaatcatttcatgttaccaataattctagacttttataacatttaacatgttgatggaaatagattacatctgctagaaccttttgccttaactattcaccaatatatgctaatattcataaatatggattgactgtttacaaacattagaatcttgtcttggttccattttgatggctaatatttgttatcttaattaagactatttctgaggtcatgattacttgaaaatattgactaaaactgggtccttagaaattccaggtggagctgatttacctatgactgaggggaaaaaaaaatcaaattttactgataatagtaatgctccaaatgaattaatgacacatctgttcaataaataaagagcttaaatatacaaaacataagaaatctgggcaacaaaacttgtggtctttacttttgaatagctacccaagaaaaggttttaaaggtaaaagttatgagtaatgtcatcacaataagctcttgtttaaaattcttttcttttatgtataattaggtttatgtttcatgtctttttaaaaccttataaaagatttaattatcacatctattcttcaatgtggaaatattaaatattgttggttgtaaaataatatttatgtacttacttgtgtctgaaaagttgtaaaatgcttacctcagctatacaatatctgtgactctgaagactttaatgagtactatttcattaacaagaagtcagaggcaaatagaggaacaccattatcttacttccctctagaatactgttgaaacatttgaaatacaaaagtttcagtttcattttgtggcattcaacttcctctcctctttttccgttattagtgttgctgctctggttagcc

SEQ ID NO: 1353 - DNA, 1093 bp, Homo sapien
gctgtgagttggcgtgctagtgggatggcagatgaggaagaagaccccacgtttgaggaagaaaatgaagaaattggaggaggtgcagaaggtggacagggtaaaagaaagagacttttttctaaagaattgcgatgtatgatgtatggctttggggatgaccagaatccttatactgagtcagtggatattcttgaagatcttgtcatagagtttatcactgaaatgactcacaaggcaatgtcaattggaagacaaggtcgagtacaagttgaagatatcgtcttcttgattcgaaaggacccaaggaagtttgccagggttaaagacttgcttactatgaatgaagaattgaaacgagctagaaaagcatttgatgaagcaaattatggatcttgacactttttgtagtttccgaaaattaccatctggggaaaccatatataataattgtatattttctaaagtaagattctgatatctagccgagatcgcaccactgcactccagcctgggcgacagagcgagactccgtctcaaaaaaaaaaaagaaagcaagtttcacatgaataatgctgtgttggaaggctttttgatttaaaatcttttcggatttataacatcctgttaagttttaggagaacccgttttcccagagcagattcaagcttctaaaaataaatgctttcagtagcaggaatggcattgtttaaaaagctgatggcagggtaagcatttgggttagtgttttattaacatatttgtaagtacttgttcattgtggaaatgtgtccttgactaaaaccatacgtggctatggaaaccatgtttgtagttctgaatacacaggttttgtgtgtatttactctatgtattaaattattattgcccttagtttaaagtaaggattacaattggatttaagtagatcactgaatgttattgtttatgaaacttaactttttgtatgctgcttataaacatgatctataaatcagtgcttgggaaaattttactttcttaatctactgatacaggaataaaatatgaacaattaaacagataaaaaaaaaaaaaaaaaaaaaaaaaaaaa

SEQ ID NO: 1354 - protein, 124 aa, Homo sapien
MADEEEDPTFEEENEEIGGGAEGGQGKRKRLFSKELRCMMYGFGDDQNPYTESVDILEDLVIEFITEMTHKAMSIGRQGRVQVEDIVFLIRKDPRKFARVKDLLTMNEELKRARKAFDEANYGS

SEQ ID NO: 1355 - DNA, 1312 bp, Homo sapien
acgccaaggcggccacgtcctgctccccctggtgaagaagctgccctgggcttgtcgtcctagggtctccagacatgtctgaggtgaagagccggaagaagtcggggcccaagggagcccctgctgcggagcccgggaagcggagcgagggcgggaagacccccgtggcccggagcagcggaggcgggggctgggcagacccccgaacgtgcctgagcctgctgtcgctggggacgtgcctgggcctggcctggtttgtatttcagcagtcagaaaaatttgcaaaggtggaaaaccaataccagttactgaaactagaaaccaatgaattccaacaacttcaaagtaaaatcagtttaatttcagaaaagtggcagaaatctgaagctatcatggaacaattgaagtcttttcaaataattgctcatctaaagcgtctacaggaagaaattaatgaggtaaaaacttggtccaataggataactgaaaaacaggatatactgaacaacagtctgacgacgctttctcaagacattacaaaagtagaccaaagtacaacttccatggcaaaagatgttggtctcaagattacaagtgtaaaaacagatatacgacggatttcaggtttagtaactgatgtaatatcattgacagattctgtgcaagaactagaaaataaaatagagaaagtagaaaaaaatacagtaaaaaatataggtgatcttctttcaagcagtattgatcgaacagcaacgctccgaaagacagcatctgaaaattcacaaagaattaactctgttaagaagacgctaaccgaactaaagagtgacttcgacaaacatacagatagatttctaagcttagaaggtgacagagccaaagttctgaagacagtgacttttgcaaatgatctaaaaccaaaggtgtataatctaaagaaggacttttcccgtttagaaccattagtaaatgatttaacactacgcattgggagattggttaccgacttactacaaagagagaaagaaattgctttcttaagtgaaaaaatatctaatttaacaatagtccaagctgagattaaggatattaaagatgaaatagcacacatttcagatatgaattagtttgacattattgagattagactaaggtaatttttttaatgggacctctcatgagaagactggtaaatcaaaaataatgatattttggagcaaaagtcattttatatttaatcctattttgtacagtaaaaataaaactttaaagcaggttgattttccaaaataaatatgctaaaacctaaaaa

SEQ ID NO: 1356 - protein, 350 aa, Homo sapien
MSEVKSRKKSGPKGAPAAEPGKRSEGGKTPVARSSGGGGWADPRTCLSLLSLGTCLGLAWFVFQQSEKFAKVENQYQLLKLETNEFQQLQSKISLISEKWQKSEAIMEQLKSFQIIAHLKRLQEEINEVKTWSNRITEKQDILNNSLTTLSQDITKVDQSTTSMAKDVGLKITSVKTDIRRISGLVTDVISLTDSVQELENKIEKVEKNTVKNIGDLLSSSIDRTATLRKTASENSQRINSVKKTLTELKSDFDKHTDRFLSLEGDRAKVLKTVTFANDLKPKVYNLKKDFSRLEPLVNDLTLRIGRLVTDLLQREKEIAFLSEKISNLTIVQAEIKDIKDEIAHISDMN

SEQ ID NO: 1357 - DNA, 3741 bp, Homo sapien
  Unsure 2475-2760: Unknown base
ggtgagaagcactagaaatatccattcagttattagtggggattaggttcaggtctgttgtttaaggagcccttaaactttaaatttcaacacaggaatggaggtccctgtgtaaggattgggaatgggacctaataactgctccctcaaggtgagttgcgagtcagctggccatctccatctcccatgcattaccttgatgtaccttccagtccaccatctgcttgtgcaccaggctgcacctactgttccatgatggaagggaaggtagaagttgggctggaaggagatgttggtccagatctgggtacatttaccccttgtggtacctcttgggagcaagaaagtccaggccctggagccttccactgacaactcttgaaggcccacctcaactgaagcctcactgatagcactttcatgagatgctggtcagggaagagcttctgatttggcctaggctagtggcagtgccaccaggcaattgcttaaaatcttctttctgccaaattctgtgatgtattaaagtatgcgatacatgaaaattgagagtggctttggttttgttgtaggtctggatctatttacctttattaagctctggagactgacatatgatatttttagatgtatgagtgcagatttatggagatattggttctggatttagtatgagatgctaaacctggtccccattgttctcaaggccactgcacctggccgataacagatgttttaatagtaagataaaaagtaaaatttccagtgtgtcgaaggaagaaaattacagcctagaattttatcttcatgtacattatttaagtgtgagggaatagtttcagtgacattatgtcattgaagaccttagaagatttccctcgctaaaggagataaagcgactggcacaacatgtatttctctgagtaagtagaagtgttcttttctggctgtactgaagggactttcatgatttcttcgtttttgtactcttagttttataatattgcatagtagctaaggcctggctgtagcagttataaactgttctgcaagtgcgggaagtaatagttattcctatctcaaggatgtggggtttaaatgggttagtgcacaaaaggacatttattaaatttagtcataatcatctcaaggacatggtaagtgaaagagtgtacataaagtacttaatgtaatgttgctacttaatgttcaataactcaaagagaccaccaccactactacattttacttttattagtaattaataataattaataattagtaattcagtggtaattagtatactaccaaagaaagtacttgagcagaagagccaaaattcaaaccatagaatcattttactgtgcttttattctacctcaaacactaatctccaggccttggataaagggattatttctctgaaggggaaagttatcctctttttgcccaagtcacacttgtgtcatttcttatactgtaaacatgtggttccaattctgaggtattttcccggcttgtaggacccaaaaagaagttaggcttgagaaattttaagtgaagagaacaattctagttcagagtgattggctcttcctaaaagctgacatttgactgaaaattttgaggggagggaaagaaacaataccttttacggcatgtaataggaagaagacctggattttagttgctgctctgatgtcccaacttgggtaaggcaacataacataaatgtcagtttcttcagatttgtgatgaagctgataatccatgctcagcttcctttatgggtctcttgcctatcaaataaggtacagtatgtgaagatacattgcagattatcttatgcattgcttcaggggatgattaaaccatcctttattatagccagagtctagtctaagggaagaaggtcattctctataccagtgaaggctccatccaaaccagtgtttgggggcatagtcataattgaaaaatgattgttttccttatctgtaaaacaggtaaatggtattaatcctcaggtggttgtgaggattaagtgatacatgtaaaaaaaagaaagctttggatagtacctattataagaaactcagtgttgctgcaatgtatgtattataatggatttgaaatttgccctaaccaagagtcacagacagaaaaaaggaagttaatgtatctcttgatcactatcaagatgtggtattgaaccttcaagatccttttcagggaatatgtgagatcaaaatttttatactggcactatgatgttatttgccttttcctcatattcacaagtgaacagtggagttttacagaagctatataatgtcatgacatcactgatgggtaatagaatgtgtgcttgtatattccgaaactttcagttccaatttcttcgatcaatgtaatcctcataagtaaaagttatttgaggacctcagacatttttaaaaatgtaaagggggtggnnnnnnnnnnnnnnnnnnnnnnnnnnnnnnnnnnnnnnnnnnnnnnnnnnnnnnnnnnnnnnnnnnnnnnnnnnnnnnnnnnnnnnnnnnnnnnnnnnnnnnnnnnnnnnnnnnnnnnnnnnnnnnnnnnnnnnnnnnnnnnnnnnnnnnnnnnnnnnnnnnnnnnnnnnnnnnnnnnnnnnnnnnnnnnnnnnnnnnnnnnnnnnnnnnnnnnnnnnnnnnnnnnnnnnnnnnnnnnnnnnnnnnnnnnnnnnnnnnnnnnnnnnnnnnnnnnnnnnnnnnnnnnggtgtacagggattgtatatttgacaacttggtatgtaggatgtgctacctctaatgttccatgctgttacttagttttcactcactactatattttggagatttgttcatattgctctgtgtacatttaattcttcagtgtgtatccaccacatttaacttattcacttacagaactatgcaagaatttctctggtaaatttcactaagtacttatgtacttttcagaacgattgtgagtttacacccctaccagcaggactgagttgagtacccatttcctcacatccttgccagtacttcatttgcctaatttttgccattctcataatgtggcaattgttcaattttgcatttcttccattttatttttttgcatctctgcttttcttttggttagctttgccagttctgcctattatattaatctcccagaatcagcttttagttttgttaaatctctgacatgtttcgttgattcctgctttcatcttaaacatttcttcgttgttaatttgtgtttgctataaaataagcaacatcttaaatgcttgatttgctttcgatgtttattctgtaataagatatttaaagatataattttttccctaaatgctttattagacttttctcataagttttgactggtactgttttcattgttatttaattttgtgttttttaacttctttcatgatttccttttaactgaaggttttcttagatatttagtttgctggtatattcttttaaaattgtatcattgctttctttctatattggattattgtcagagaacatgatttgcatgatattaactttttggagtatattgttgcatctttgtggcctagtacatagttaatttagtgaatgcttccagttgtacttgaaaagaatgtatattttctgattattgagggtaaatttctctatatatgttttcctgtttaataaatatgtagctatgtgcttatgaaa

SEQ ID NO: 1358 - protein, 14 aa, Homo sapien
VRSTRNIHSVISGD

SEQ ID NO: 1359 - DNA, 3132 bp, Homo sapien
ccgcagaacttggggagccgccgccgccatccgccgccgcagccagcttccgccgccgcaggaccggcccctgccccagcctccgcagccgcggcgcgtccacgcccgcccgcgcccagggcgagtcggggtcgccgcctgcacgcttctcagtgttccccgcgccccgcatgtaacccggccaggcccccgcaacggtgtcccctgcagctccagccccgggctgcacccccccgccccgacaccagctctccagcctgctcgtccaggatggccgcggccaaggccgagatgcagctgatgtccccgctgcagatctctgacccgttcggatcctttcctcactcgcccaccatggacaactaccctaagctggaggagatgatgctgctgagcaacggggctccccagttcctcggcgccgccggggccccagagggcagcggcagcaacagcagcagcagcagcagcgggggcggtggaggcggcgggggcggcagcaacagcagcagcagcagcagcaccttcaaccctcaggcggacacgggcgagcagccctacgagcacctgaccgcagagtcttttcctgacatctctctgaacaacgagaaggtgctggtggagaccagttaccccagccaaaccactcgactgccccccatcacctatactggccgcttttccctggagcctgcacccaacagtggcaacaccttgtggcccgagcccctcttcagcttggtcagtggcctagtgagcatgaccaacccaccggcctcctcgtcctcagcaccatctccagcggcctcctccgcctccgcctcccagagcccacccctgagctgcgcagtgccatccaacgacagcagtcccatttactcagcggcacccaccttccccacgccgaacactgacattttccctgagccacaaagccaggccttcccgggctcggcagggacagcgctccagtacccgcctcctgcctaccctgccgccaagggtggcttccaggttcccatgatccccgactacctgtttccacagcagcagggggatctgggcctgggcaccccagaccagaagcccttccagggcctggagagccgcacccagcagccttcgctaacccctctgtctactattaaggcctttgccactcagtcgggctcccaggacctgaaggccctcaataccagctaccagtcccagctcatcaaacccagccgcatgcgcaagtatcccaaccggcccagcaagacgcccccccacgaacgcccttacgcttgcccagtggagtcctgtgatcgccgcttctcccgctccgacgagctcacccgccacatccgcatccacacaggccagaagcccttccagtgccgcatctgcatgcgcaacttcagccgcagcgaccacctcaccacccacatccgcacccacacaggcgaaaagcccttcgcctgcgacatctgtggaagaaagtttgccaggagcgatgaacgcaagaggcataccaagatccacttgcggcagaaggacaagaaagcagacaaaagtgttgtggcctcttcggccacctcctctctctcttcctacccgtccccggttgctacctcttacccgtccccggttactacctcttatccatccccggccaccacctcatacccatcccctgtgcccacctccttctcctctcccggctcctcgacctacccatcccctgtgcacagtggcttcccctccccgtcggtggccaccacgtactcctctgttccccctgctttcccggcccaggtcagcagcttcccttcctcagctgtcaccaactccttcagcgcctccacagggctttcggacatgacagcaaccttttctcccaggacaattgaaatttgctaaagggaaaggggaaagaaagggaaaagggagaaaaagaaacacaagagacttaaaggacaggaggaggagatggccataggagaggagggttcctcttaggtcagatggaggttctcagagccaagtcctccctctctactggagtggaaggtctattggccaacaatcctttctgcccacttccccttccccaattactattccctttgacttcagctgcctgaaacagccatgtccaagttcttcacctctatccaaagaacttgatttgcatggattttggataaatcatttcagtatcatctccatcatatgcctgaccccttgctcccttcaatgctagaaaatcgagttggcaaaatggggtttgggcccctcagagccctgccctgcacccttgtacagtgtctgtgccatggatttcgtttttcttggggtactcttgatgtgaagataatttgcatattctattgtattatttggagttaggtcctcacttgggggaaaaaaaaaaaaaaaagccaagcaaaccaatggtgatcctctattttgtgatgatgctgtgacaataagtttgaacctttttttttgaaacagcagtcccagtattctcagagcatgtgtcagagtgttgttccgttaacctttttgtaaatactgcttgaccgtactctcacatgtggcaaaatatggtttggtttttcttttttttttttgaaagtgttttttcttcgtccttttggtttaaaaagtttcacgtcttggtgccttttgtgtgatgccccttgctgatggcttgacatgtgcaattgtgagggacatgctcacctctagccttaaggggggcagggagtgatgatttgggggaggctttgggagcaaaataaggaagagggctgagctgagcttcggttctccagaatgtaagaaaacaaaatctaaaacaaaatctgaactctcaaaagtctatttttttaactgaaaatgtaaatttataaatatattcaggagttggaatgttgtagttacctactgagtaggcggcgatttttgtatgttatgaacatgcagttcattattttgtggttctattttactttgtacttgtgtttgcttaaacaaagtgactgtttggcttataaacacattgaatgcgctttattgcccatgggatatgtggtgtatatccttccaaaaaattaaaacgaaaataaagtagctgcgattggg

SEQ ID NO: 1360 - protein, 543 aa, Homo sapien
MAAAKAEMQLMSPLQISDPFGSFPHSPTMDNYPKLEEMMLLSNGAPQFLGAAGAPEGSGSNSSSSSSGGGGGGGGGSNSSSSSSTFNPQADTGEQPYEHLTAESFPDISLNNEKVLVETSYPSQTTRLPPITYTGRFSLEPAPNSGNTLWPEPLFSLVSGLVSMTNPPASSSSAPSPAASSASASQSPPLSCAVPSNDSSPIYSAAPTFPTPNTDIFPEPQSQAFPGSAGTALQYPPPAYPAAKGGFQVPMIPDYLFPQQQGDLGLGTPDQKPFQGLESRTQQPSLTPLSTIKAFATQSGSQDLKALNTSYQSQLIKPSRMRKYPNRPSKTPPHERPYACPVESCDRRFSRSDELTRHIRIHTGQKPFQCRICMRNFSRSDHLTTHIRTHTGEKPFACDICGRKFARSDERKRHTKIHLRQKDKKADKSVVASSATSSLSSYPSPVATSYPSPVTTSYPSPATTSYPSPVPTSFSSPGSSTYPSPVHSGFPSPSVATTYSSVPPAFPAQVSSFPSSAVTNSFSASTGLSDMTATFSPRTIEIC

SEQ ID NO: 1361 - DNA, 1895 bp, Homo sapien
ggcacagggctgtgactagcgggccggcccgggccaggacagcgggcggcgggcggcgcgggcctggccccgggatggctatgttccgcagcctggtggcctcggctcagcagcggcagccgccggccgggccggcgggcggcgacagcggcctggaggcgcagtacacctgccccatctgcctggaggtctatcaccggcccgtggccatcggcagctgcggccacacgttctgcggggagtgtctccagccctgcctgcaggtgccatccccgctgtgcccactgtgccgcctgcccttcgaccccaagaaggtggacaaggccacccacgtggagaagcagctctcatcctacaaagcgccctgtcgaggctgcaacaaaaaggtgaccctggcaaagatgagagtgcacatttcgtcctgcctgaaggtccaggagcagatggccaactgccccaagttcgtccccgtggtgcccacatcacagcctatccccagcaacatccccaacaggtccaccttcgcctgcccgtactgtggtgcccgcaacctggaccagcaggagctggtgaagcactgtgtggaaagccaccgcagcgaccccaaccgcgtggtgtgccccatctgctcggcaatgccctggggggaccccagctacaagagcgccaacttcctgcagcacctgcttcaccgacacaagttctcctacgacacctttgtggactacagtattgacgaggaggccgccttccaggctgctctggccctgtctctctctgagaactgaagggaagcgcagccacccgcctgcgtctggggtcagggatgtccccgctcctgtgtcgcacctggcacctgctcgggagcgcacctcaccggactgagctcacaggaggagcctgcacccgcgcagaaggggagccggggccgagcctccgggcctgaatacgggccagccgccgaggccgccagagcagggccgcctggtcccaccggcgtcgctgggttcttcggtgcttctggccgagcaggcggcctacttgggcagggctggacgctgggacctggagctgccgccgtctcttcaaagccatgataccccctcgtgggaagaagggaccgacgcgcgagtcgcgctccgcagtcgagccgggaggaacccaggctgctgccctgcccagcccgaccctgccccggccccgcttccaccttgcgcatttggtactggcttttgtgatacttaggaaccctggcatcttttctatattatccagtgtgataatcttttcacgttttatagagcaaagacagagcagttactcttcatattgcaatatctgtgtttgactaggaataatagtatttttatggaacatttacaaaattatattttttaagaaaacaatcaaaacaagcattgggggattggggcaaggatggaaggagcagtggggcagctgccagagctcaggcgagccatggggtctgctgtggggtctgccctggccacccactgtgtgtctgggtccttgaggtttgtacgtttctctttgatgaccaggaagaaatcccagcaccccagccacaggctgtggctgctcccagcagaggtggggccggcagagaaggggcctcctccacccagagtcctggccttggcccgctgtcaccttcaaagctgactgtgccccgctgcgggaggggacggcaccccagtggtggcagagcttgggggcctgggcaggggcccgcttggcgggccgggcaacacgtcaacattcttttctgttcttggcattaattattgctgtctttttttaaaaaaaaaaagtttaaataaaatgtctcagagcaaaaaaaaaaaaaaaaaaaaaaaaaaaaaaaaaaaaaaaaa

SEQ ID NO: 1362 - protein, 237 aa, Homo sapien
MAMFRSLVASAQQRQPPAGPAGGDSGLEAQYTCPICLEVYHRPVAIGSCGHTFCGECLQPCLQVPSPLCPLCRLPFDPKKVDKATHVEKQLSSYKAPCRGCNKKVTLAKMRVHISSCLKVQEQMANCPKFVPVVPTSQPIPSNIPNRSTFACPYCGARNLDQQELVKHCVESHRSDPNRVVCPICSAMPWGDPSYKSANFLQHLLHRHKFSYDTFVDYSIDEEAAFQAALALSLSEN

SEQ ID NO: 1363 - DNA, 2623 bp, Homo sapien
ttgagcgcaggtgagctcctgcgcgttccgggggcgttcctccagtcaccctcccgccgttacccgcggcgcgcccgagggagtctcctccagaccctccctcccgttgctccaaactaatacggactgaacggatcgctgcgagggtgggagagaaaattagggggagaaaggacagagagagcaactaccatccatagccagatagattatcttacactgaactgatcaagtactttgaaaatgacttcgaaatttatcttggtgtccttcatacttgctgcactgagtctttcaaccaccttttctctccaactagaccagcaaaaggttctactagtttcttttgatggattccgttgggattacttatataaagttccaacgccccattttcattatattatgaaatatggtgttcacgtgaagcaagttactaatgtttttattacaaaaacctaccctaaccattatactttggtaactggcctctttgcagagaatcatgggattgttgcaaatgatatgtttgatcctattcggaacaaatctttctccttggatcacatgaatatttatgattccaagttttgggaagaagcgacaccaatatggatcacaaaccagagggcaggacatactagtggtgcagccatgtggcccggaacagatgtaaaaatacataagcgctttcctactcattacatgccttacaatgagtcagtttcatttgaagatagagttgccaaaattgttgaatggtttacgtcaaaagagcccataaatcttggtcttctctattgggaagaccctgatgacatgggccaccatttgggacctgacagtccgctcatggggcctgtcatttcagatattgacaagaagttaggatatctcatacaaatgctgaaaaaggcaaagttgtggaacactctgaacctaatcatcacaagtgatcatggaatgacgcagtgctctgaggaaaggttaatagaacttgaccagtacctggataaagaccactataccctgattgatcaatctccagtagcagccatcttgccaaaagaaggtaaatttgatgaagtctatgaagcactaactcacgctcatcctaatcttactgtttacaaaaaagaagacgttccagaaaggtggcattacaaatacaacagtcgaattcaaccaatcatagcagtggctgatgaagggtggcacattttacagaataagtcagatgactttctgttaggcaaccacggttacgataatgcgttagcagatatgcatccaatatttttagcccatggtcctgccttcagaaagaatttctcaaaagaagccatgaactccacagatttgtacccactactatgccacctcctcaatatcactgccatgccacacaatggatcattctggaatgtccaggatctgctcaattcagcaatgccaagggtggtcccttatacacagagtactatactcctccctggtagtgttaaaccagcagaatatgaccaagaggggtcatacccttatttcataggggtctctcttggcagcattatagtgattgtattttttgtaattttcattaagcatttaattcacagtcaaatacctgccttacaagatatgcatgctgaaatagctcaaccattattacaagcctaatgttactttgaagtggatttgcatattgaagtggagattccataattatgtcagtgtttaaaggtttcaaattctgggaaaccagttccaaacatctgcagaaaccattaagcagttacatatttaggtatacacacacacacacacacacacatacacacacacggaccaaaatacttacacctgcaaaggaataaagatgtgagagtatgtctccattgttcactgtagcatagggatagataagatcctgctttatttggacttggcgcagataatgtatatatttagcaactttgcactatgtaaagtaccttatatattgcactttaaatttctctcctgatgggtactttaatttgaaatgcactttatggacagttatgtcttataacttgattgaaaatgacaactttttgcacccatgtcacagaatacttgttacgcattgttcaaactgaaggaaatttctaataatcccgaataatgaacatagaaatctatctccataaattgagagaagaagaaggtgataagtgttgaaaattaaatgtgataacctttgaaccttgaattttggagatgtattcccaacagcagaatgcaactgtgggcatttcttgtcttatttctttccagagaacgtggttttcatttatttttccctcaaaagagagtcaaatactgacagattcgttctaaatatattgtttctgtcataaaattattgtgatttcctgatgagtcatattactgtgattttcataataatgaagacaccatgaatatacttttcttctatatagttcagcaatggcctgaatagaagcaaccaggcaccatctcagcaatgttttctcttgtttgtaattatttgctcctttgaaaattaaatcactattaattacattaaaaatcaaattggataaaaaaaaaaaaaaaaaaa

SEQ ID NO: 1364 - protein, 477 aa, Homo sapien [sequence omitted]

SEQ ID NO: 1365 - DNA, 1027 bp, Homo sapien; identical to SEQ ID NO: 1215

SEQ ID NO: 1366 - protein, 220 aa, Homo sapien; identical to SEQ ID NO: 1216

SEQ ID NO: 1367 - DNA, 1179 bp, Homo sapien
ggcacgaggtgatgaagaagccagttatctcagatttcgaaatagtatatggaaaaatgaagaagagaaagtggaaatttttcatcctttgcgactagttcgggatccactgtcacctgctgtaagacagaaagaaactgtgaaaaatgacctgcctgtaaatgaagctgcaattagaaaaatagctgcccttgaaaatgagctgacttttcttcgctctcagattgcagcaattgtggaaatgcaggaactgaaaaatagtacaaattctagttcctttggcttgagtgacgagcgcattagtttgggtcagctgtcatcatcgcgggctgcccatctgagtgtggacccagatcagcttccaggttcagtgctttctcctcctcctcctccaccacttcctcctcagttttcatctctccagccaccgtgttttcctcccgtacaaccaggatctaataatatttgtgactcagataatccagcaactgaaatgagcaaacagaacccggctgctaataagaccaattatagtcatcattcaaaaagccagagaaataaagatattccaaacatgttggacgttctaaaggatatgaataaggttaagcttcgtgcaattgagcggtcacctggcggtagacccattcataagaggaaaagacagaattcacattgggatccagtttctttaatatctcatgcacttaaacagaaatttgcatttcaagaagatgattcttttgagaaagagaatagatcttgggaatcttccccattttctagtccagaaacttcaaggtttggacatcacatttcacagtcagaaggacagcgaactaaagaagaaatggtcaacacaaaagctgttgaccaaggtatcagcaacacaagccttctaaactcaaggatttaaactcaacttaaggttgagctttaaacttccaaaacttcttcctggatgataaattattcttagaaactgatttggactgttaaaggctaaaagtagatgtatttaaagactcttcttgacacattttgcctacacttgctatgtaaatatgtatgcctgtcatttttgtttcctttgttcctttttacgtttatactctgttcttctgtacatagagcttaaaataaacattctttttgaacttgaaaaaaaaaaaaaaaaaa

SEQ ID NO: 1368 - protein, 224 aa, Homo sapien
MQELKNSTNSSSFGLSDERISLGQLSSSRAAHLSVDPDQLPGSVLSPPPPPPLPPQFSSLQPPCFPPVQPGSNNICDSDNPATEMSKQNPAANKTNYSHHSKSQRNKDIPNMLDVLKDMNKVKLRAIERSPGGRPIHKRKRQNSHWDPVSLISHALKQKFAFQEDDSFEKENRSWESSPFSSPETSRFGHHISQSEGQRTKEEMVNTKAVDQGISNTSLLNSRI

SEQ ID NO: 1369 - DNA, 1201 bp, Homo sapien
cgcggttcggtcggctgcagcgctacttttggtccggggtcggcagggaggccgcggctaccgcatcacagctgacgtgaggactacgtggggccgctgccggctccgggttgctgggcggcggcgccgctgctgagcggcggtcgggctcgccgtctccacctcctcgcgtccgtaatcagtgacgaggtccgctacgtaaatccctttgcggcggacaaatgaccatggaaacagttgaatcccagcatgatggaagtataacagcttctttgacagagagcaagtctgctcatgtgcagactcagactggccaaaattcaatccctgctttagctcaggtagcagcaattgcagagacagatgaatctgcagaatcagaaggtgtaattgattctcataaacgtagagaaatcctttcacgaagaccctcttataggaaaatactgaatgaactgtcctctgatgtgcctggtgttcccaagattgaagaagagagatcagaggaagaaggaacaccacctagtattgctaccatggcagtaccaactagcatatatcagactagcacggggcaatacagtatgtatgctgcaattcgatatgatacagtgctagctttaagtcttctctagttatattgaagcaactcaggttttggcattaaattgttccattttaaaatgcatcattaatacctaaactgtatcatagaatgaaagtatatgttaaaaagtgagatctttgtattgacagctgtcatataattttgaaaagtaaaaattttgactgccgaatatagaagaaaattttggggtaaaaaggagaatttttcctatttacatgtttatattaatctctagtaaaacattgtttttgttgtctttatgatgcatgcgaacataaatgtctgtatttcattcttgttggcttttgttacccacaattacatactattcttactaatctgagagttttctaaagtatgttttcaatgtttcactactctctactctgttaatttgtgctacagtttttcctaaaagagaatggaaaaatgatttaattttttaaactgtagcaattggatagataattttatttgaaattttacacactgaaagctctaaataaacagatacattcacaaaaaaaaaaaaaaaaaaaaaaaaaaaaaaaaaaaaaaaaaaaaaaaaaaaaa

SEQ ID NO: 1370 - protein, 137 aa, Homo sapien
MTMETVESQHDGSITASLTESKSAHVQTQTGQNSIPALAQVAAIAETDESAESEGVIDSHKRREILSRRPSYRKILNELSSDVPGVPKIEEERSEEEGTPPSIATMAVPTSIYQTSTGQYSMYAAIRYDTVLALSLL

SEQ ID NO: 1371 - DNA, 1635 bp, Homo sapien; identical to SEQ ID NO: 1089

SEQ ID NO: 1372 - protein, 445 aa, Homo sapien; identical to SEQ ID NO: 1090

SEQ ID NO: 1373 - DNA, 1700 bp, Homo sapien
acatgacgggcacgccaggcgccgttgccacccgggatggcgaggcccccgagcgctccccgccctgcagtccgagctacgacctcacgggcaaggtgatgcttctgggagacacaggcgtcggcaaaacatgtttcctgatccaattcaaagacggggccttcctgtccggaaccttcatagccaccgtcggcatagacttcaggaacaaggtggtgactgtggatggcgtgagagtgaagctgcagatctgggacaccgctgggcaggaacggttccgaagcgtcacccatgcttattacagagatgctcaggccttgcttctgctgtatgacatcaccaacaaatcttctttcgacaacatcagggcctggctcactgagattcatgagtatgcccagagggacgtggtgatcatgctgctaggcaacaaggcggatatgagcagcgaaagagtgatccgttccgaagacggagagaccttggccagggagtacggtgttcccttcctggagaccagcgccaagactggcatgaatgtggagttagcctttctggccatcgccaaggaactgaaataccgggccgggcatcaggcggatgagcccagcttccagatccgagactatgtagagtcccagaagaagcgctccagctgctgctccttcatgtgaatcccagggggcagagaggaggctctggaggcacacaggatgcagccttccccctcccaggcctggcttattccaagaggctggtcttgaattcctgagctcaagcaacctgccggcctcggcctcccaaagtactgggattacacgcagaaggcaccatgcccaggctagatgtgtcttatcccaatcctttggcaggcatgcagctccacaggcgatttcttcaagcagctgaagtgtttagccctcctgggttaagagccagataaggagaaatccctttcctaggtttggaatgtgttgtgaaaaaaaagagaaatccctggctcctggagctggtgggagacaagattaagcaaacctcccctgacatgtatccctttgaccccaagctctgcctcctccctgaccacccatgccctttcctttaacttctcaaacagataccagggcctaaactgctttacctcccctcctactgagtcaggttaggtggtgggaggtcacccatttccgagttaaaccaatgcaatatgagtaaaacaaagtcatgtgggtatgtctggggtagagagaggggtagcaagttcatgtgtcctccttggtcacatatctcccaaagctccgatccctgccatgggaagtggacaggaaacatgaggtcatgacctgcaggcatctttactgcagctctgccggcctggagggggagagggggaggaagaagtatgcgctgcacatttctgaggctactgcatttgctttcaaggcagaaatcttgctctgagcagtcagcggctccagtttgggcccgataaggaagttctccgtggcctccctcaggcagagcagggaggaggctgacattgccagtctcttctggggcccaaggcaggttgcaggagatccaatcccatagacagctctgggcctcttgcatttgagtttttcagaattaaactgcagtattttggaaagcaaaaaaaaaaaaaaaaaaaaaaaaaaaaaaaaaaaaaaaaaaaaaaa

SEQ ID NO: 1374 - protein, 223 aa, Homo sapien
MTGTPGAVATRDGEAPERSPPCSPSYDLTGKVMLLGDTGVGKTCFLIQFKDGAFLSGTFIATVGIDFRNKVVTVDGVRVKLQIWDTAGQERFRSVTHAYYRDAQALLLLYDITNKSSFDNIRAWLTEIHEYAQRDVVIMLLGNKADMSSERVIRSEDGETLAREYGVPFLETSAKTGMNVELAFLAIAKELKYRAGHQADEPSFQIRDYVESQKKRSSCCSFM

SEQ ID NO: 1375 - DNA, 2471 bp, Homo sapien
gcggcgggtactctgtgccccgcgtcccggaggcagccgactgcgccaccccaccctcgcacggccgggcgggacccgcgccaccagcccggacctccgtcgtcccgcggcgaccaaaacccccgctggccccaccgctgtgactactctggactcgcccgcagagtttgcccgccggggagggtggccgattggcggagcgcactcctgctgttttccccaccatctcgtggatgtcgtccctcgggtggtgagagaactttgcagtgggctggagcgccctttgcggagaagcacacgaaggtgaaggaaggaaagaaagaagaccgaggaagaaggagctcggaagaagggtccggagcggccggtccggccgtgcagggcgagtgcgcccgaggcgcggcgccctgatgctccccgggctcgaggagcattgggcacttgcgggactgctctcggtggagtagccccgtcgggcccggagggtttgtgcaaccgcggagaacaccgagtgctggtcgcacggggcgtgccgagccgcctcccggcgcgccctccgcactttccccgcctcgtcatccgtcgctccccggccaggagcctccgctgcgtcttcaacctcgctcccctttgcgtcccgggagcctgcgagcacccggccgaaggcgcagccgaatcttgcgggagtcgccccgaaagcgtcgggtttgtgtggggttagcgggggccgccgcgccacctgcacctcgcccgccgccgcctcggggaaagcccgaagaggaggcggaccaggagaagagcaaagaaaagcagtccgtctggatttgtttgcccaggactggcgccgcgcacgcggatcgccgaggggagtgcggtcggagtcaccgcgcccccgcctccccgcccgggcagctgaggccgggggttggagcgctgcccccgcgtacagtccccgagcgcccgacgtctccgcgcaggttcttgaagcagctgggcctggggcgcccactaatgtggccctgagggccggagcccgcaccgacgggagcgggagccggagcagctgcgggcgccgagtggccggtgcgcccggcggagcgcgcgtgcgtggccagcgcgctccccgcttctgcttggctttccggcttaattttcctcggcgggattaaagttggaaattgaccggagaattgagttgccggggaacagagccccggccgccgccagagcgatgttcccgcagagccggcacccgacgccgcaccaggctgcaggccagcccttcaagttcactatcccggagtccctggaccggattaaagaggaattccagttcctgcaggcgcagtatcacagccttaaattggaatgtgagaaactggcaagtgaaaagacagaaatgcagaggcactatgtgatgtattatgaaatgtcatatggattaaacattgaaatgcacaaacagactgaaatcgccaagagattgaatacgatttgtgcacaagtcatcccatttctgtctcaggaacatcaacaacaggtggcccaggctgttgaacgtgccaaacaggtgaccatggcagagttgaatgccatcatcggggtacgtggcctaccaggtctacctcctacacagcagcagttgcaagctcagcatctttctcatggccacggacccccagttccccttacgcctcacccttcgggacttcagcctcctggaatcccgcccctcgggggcagtgccggccttcttgcgctgtctagtgctctgagtgggcagtctcacttggcaataaaagatgacaagaagcaccacgatgcagagcaccacagaggtgagaggccgggcaagccagattaggactttgtcctcatactcttacagtgctgcaaagttgtgtgcatcgctaaagagagccccaacctatacagagagcaaacaatgagataagaggaactgtcgcaaagctttccactgaaacacaggtcaccctggaagtttgcagggtttgctgtgggcatctgtagatttctcgatctcgttagattgcaggcatcttgacatcttggcaactgcctagttaatgccagtggcctgtaccatattatggaaaactgttaactgcttaattgggtaattttcaaagaaagtaatgttgttaaatggggcgaaataagaagttaaatttgaaagtgaatgtgttcaaatgaaaggtttgataattgcgtctgttactacttagtttcataggctttaattctagtatgcattaaatattgggcaaaattgcacttgactaattttttgaagaaaagtaatttattctgtcaagaaataaaaaaataggctttgtgtatggttaaactgtaaatcttatgtttacaaaatactgtaattttcaggaaatcactgtattaggaatgtgcaatgacttatataaataaaagccatttttaaaactgaaaaa

SEQ ID NO: 1376 - protein, 210 aa, Homo sapien
MFPQSRHPTPHQAAGQPFKFTIPESLDRIKEEFQFLQAQYHSLKLECEKLASEKTEMQRHYVMYYEMSYGLNIEMHKQTEIAKRLNTICAQVIPFLSQEHQQQVAQAVERAKQVTMAELNAIIGVRGLPGLPPTQQQLQAQHLSHGHGPPVPLTPHPSGLQPPGIPPLGGSAGLLALSSALSGQSHLAIKDDKKHHDAEHHRGERPGKPD

SEQ ID NO: 1377 - DNA, 2366 bp, Homo sapien
  Unsure 1185: Unknown base
  Unsure 1831-1952: Unknown base
gcaattggtggctttgaaggcgcggcgagcgggaacagctcttgaggagtgagactgcaggagatgtgggccgtgccaaagagatggatgagactgttgctgagttcatcaagaggaccatcttgaaaatccccatgaatgaactgacaacaatcctgaaggcctgggattttttgtctgaaaatcaactgcagactgtaaatttccgacagagaaaggaatctgtagttcagcacttgatccatctgtgtgaggaaaagcgtgcaagtatcagtgatgctgccctgttagacatcatttatatgcaatttcatcagcaccagaaagtttgggatgtttttcagatgagtaaaggaccaggtgaagatgttgacctttttgatatgaaacaatttaaaaattcgttcaagaaaattcttcagagagcattaaaaaatgtgacagtcagcttcagagaaactgaggagaatgcagtctggattcgaattgcctggggaacacagtacacaaagccaaaccagtacaaacctacctacgtggtgtactactcccagactccgtacgccttcacgtcctcctccatgctgaggcgcaatacaccgcttctgggtcaggcgctgacaattgctagcaaacaccatcagattgtgaaaatggacctgagaagtcggtatctggactctcttaaggctattgtttttaaacagtataatcagacctttgaaactcacaactctacgacacctctacaggaaagaagccttggactagatataaatatggattcaaggatcattcatgaaaacatagtagaaaaagagagagtccaacgaataactcaagaaacatttggagattatcctcaaccacaactagaatttgcacaatataagcttgaaacgaaattcaaaagtggtttaaatgggagcatcttggctgagaggaaagaacccctccgatgcctaataaagttctctagcccacatcttctggaagcattgaaatccttagcaccagcgggtattgcagatgctccactttctccactgctcacttgcatacccaacaagagaatgaattattttaaaattagagataaataagacgtgcgtggtttcttaagcacagctcctccttcttgatattgcacatgcacttcagttcatgggctagctgtatagcttncgtctgtaaacttgtaatttcaagaatccttggtattgaattttagaaatgctcacataattgttgggactgattcattcctccacggatatgcctcctctctctgatatcctgctaactgtagccgttgtggcatttgagatgacaggacatatatatatatggccccacacttgaccttgagtgcctgaatgctctgaaatcaagcatatggcacagcgctcaagacttttgggtttgtgtccttttttctatggctgtctcttctcaattctggagaggtctggttccagtggctggtttccagggattgattcttaagctctggatcacagagagaagcaacaaggaactatactcaactcaaaactttttaggagaatcatgaaattggtctattcaaaggatggagttgagtccattctgttattgttgcaagaggttgcatatttggtgagtcagttatataaaatagtgttcttattgtaaatatgatacttctcataatctattttatcatgtgtataacattcaaactgacaaatatattgacttatgaataaaggtgtcaaaaaactggcacatcagttaattttgatcaaagtacttcagtgatcatcactaaataccctatctttttaaaaannnnnnnnnnnnnnnnnnnnnnnnnnnnnnnnnnnnnnnnnnnnnnnnnnnnnnnnnnnnnnnnnnnnnnnnnnnnnnnnnnnnnnnnnnnnnnnnnnnnnnnnnnnnnnnnnnnnnnnnnnaatgacatcactttggttcagagctctaaaatggagggaggaagccattctaaaaaggactccctacatgacctgcaacttgaaaaaaaattaaaagctccaaaaaaaaaacaatacaggagcttaccttgaacctttgaattgggccaaattgcgatgaccactgcatcctggaaaattttatttcaccagcactacaactcctcaacagcaccaaccaataaactatggatttttgtactaagccagttgcctctttcaaaacaacttgtcaacttgtctaatcaccctcagctttttttaaaaacccctcctctaccctctctcttcagaacacaagtggcttctagctgaatctgtctcccaaattgcaattcctaagacctcaataaaaacaccttgtcttgctgaaaa

SEQ ID NO: 1378 - protein, 366 aa, Homo sapien
AIGGFERGEREQLLRSETAGDVGRAKEMDETVAEFIKRTILKIPMNELTTILKAWDFLSENQLQTVNFRQRKESVVQHLIHLCEEKRASISDAALLDIIYMQFHQHQKVWDVFQMSKGPGEDVDLFDMKQFKNSFKKILQRALKNVTVSFRETEENAVWIRIAWGTQYTKPNQYKPTYVVYYSQTPYAFTSSSMLRRNTPLLGQALTIASKHHQIVKMDLRSRYLDSLKAIVFKQYNQTFETHNSTTPLQERSLGLDINMDSRIIHENIVEKERVQRITQETFGDYPQPQLEFAQYKLETKFKSGLNGSILAERKEPLRCLIKFSSPHLLEALKSLAPAGIADAPLSPLLTCIPNKRMNYFKIRDK

SEQ ID NO: 1379 - DNA, 2450 bp, Homo sapien
  Unsure 2223-2252: Unknown base
ccactattccacagggaaggtcagcgcttccttcacctccaccgcgatggtcccggagaccacacatgaagcagctgccatcgacgaggatgtgctgcgctaccagtttgtgaagaagaagggctacgtgcggctgcacaccaacaagggcgacctcaacctggagctgcactgcgacctgacaccaaaaacctgcgaaaacttcatcaggctttgcaagaagcattattacgatggaccatcttccacagatccatccggaactttgtgatccaagggggcgaccccacaggcacaggcacgggtggggagtcatactgggggaagcccttcaaagacgagttccggcccaacctctcgcacacgggccgcggcatcctcagcatggccaactccgggcccaacagcaacaggtctcaattcttcatcacgtttcgctcctgtgcctacctggacaagaagcataccatctttggacgggttgttgggggctttgacgtactgacagccatggagaatgtggagagtgaccccaaaactgaccgccctaaggaggagatccgcattgatgccactacagtgttcgtggacccctatgaggaggccgatgcccagattgcgcaggagcggaagacacagctcaaggtagccccggagaccaaagtgaagagcagccagccccaggcagggagccagggcccccagaccttccgccagggcgtgggcaagtacatcaacccagcagccacgaagcgagcagcagaggaagagccctcaaccagtgccactgtccccatgtccaagaagaagcccagtcggggttttggggacttcagctcctggtagcagcaggctgcctgatgaccactagaggtatgtctgcccctcgtcaccctgctgcacaccaatctgtggcccttcatcatgctaagaacaagaactgcgccatggctggctccttctcttctccagcccatccctctgcagcctgtcatccctgtctgtgaccattggtcgggcccctgggctctagagtgacttttgacgccctccatccctcccgccaggcactgtcctccgcaaggcctggtgcagccctggcagtaactggcttgtaagaggctcagacaccaagctgggcctgcagaggaggggcacagtaggacacagtgactgcccaggtgtccacacacctgtaggcctctgagccagcgtccagggtacagatgcgggtggtggggatgaaggcctgaccagggagggagaagcaggtttggagaggaccctgtgcccaccctgacagacaccctggctggccctgactgactgtattctctggccacattcaagtcccccattggtgggggcagagaagtaggaccaggccgtccttggctccagagctcgaagaccccaagacagccctctgctctcagcggcgccacagagagcctgggctcagccttctgcatcaggacatggcctcgtccactgagggcacgatttaaacatttgacatcagaagctttatttgtaaacctcacacagataaggaccaagggctggcggtgtggccagaggacaggggaagctgaaggccccgtgcttgagctcggcagtcctgctccttgcagtgaagccaccatgggtgaccgtccagcctcacccggtggcctgcacagtgagggaagggcttcagggccatctgctcccagggcaggggacaggccaccaaggacctttggcaaatgaaggtttacatttctgtagtttgtttgttttagagcttaatttgtagttttttagctattaaaaccatttgaatttttaacgacctgatgagggcatcaggtaaattaaaggattttgggaagattcttattttcaattctaatatctgacagatgccatcaagaataagcattaaggtataaaaaatactgtgtgtataaaacaatgccaaaccacattcctacagcaaatgcactgtgccatttataaccctgacatcacctcccaaggctctcaaggaagatttattttaaataacttaaatagaagtcctagatgatattgtttaggaatttaagagggtggtggatatggtcctgtgaatagcacttcccctgaagccagctcatggtctgttcatttggtttaaaaatgagcttgtattttgcagaagcccaacaaaaaaaaagtgataaaagtgttgttggtatnnnnnnnnnnnnnnnnnnnnnnnnnnnnnngtcataagactactagtaaaaaatgttcaatcaatgccgtcacaaagacagtacaaaaaccaagtgcccaaatagaaggagcagcgaacttgcccaaacagaaaagctctaaatagaactttagtatatacaaaaccactcggtagagttttagaagtttcttccatgtaagtgaagcatcttgagtcactcagactt

SEQ ID NO: 1380 - protein, 153 aa, Homo sapien
MANSGPNSNRSQFFITFRSCAYLDKKHTIFGRVVGGFDVLTAMENVESDPKTDRPKEEIRIDATTVFVDPYEEADAQIAQERKTQLKVAPETKVKSSQPQAGSQGPQTFRQGVGKYINPAATKRAAEEEPSTSATVPMSKKKPSRGFGDFSSW

SEQ ID NO: 1381 - DNA, 2879 bp, Homo sapien
  Unsure 1606-1623: Unknown base
  Unsure 2174-2248: Unknown base
gaggcttttcagcctcatttgaggtacagttacatatcttttgccttttgcccccgtgcatagctatctacagccaatcacagatcacagagtcactggactatagagctggaaggaagctcagagacaatgccaagggggcagaaaatttatcagaagccagtcccagtgcgtttcctccatttccttctgcaggaagactattttgggctgcctgaacattgtatcaaacctgctacctatactatggtctacctttcctccagtggaattacaaaggcactaactgaaatgccttctagaaacagagaaaacgaaactgtacttatttactcttgatacacagattatttataaaacagattgaagtaacctgttaactggcaaaaagagaatgagatcggatttaaatgtatggcagtaagtcctattgatccctccagttatctcagtatgactgcagtatattcattcactaaaaccactcactagataccaactacacatctggcactgcagatgtaaaggtcagtcacacatgttctgactttacagagttcacagtagcagtggaggatgatatatgtggaaacaaaaaaggcattgattctattcagagcactgttagggctcaaaggagagaggggtctttccacctaagaaatgaggaatagggtcatcatagaagtgaccttaagtcttaaaaattaagaaggggattccaagctgcttcagacagagacacatcgagctaaaacacagaggtatgaaagagcacagggactttaggaattgcacagttcattctaacaggaacaaaaggctcaaggggggcaagaaatgaggctgtatggaaagagattcaatgtaagcactttataaaatagattaatttctgattcaatgaagcatttcttgatcattgtgtacaaggcactacatgcatcatggaaaattcattaggatgcattgccagcacttgcagaactgatattattcagcctcaagctttccagtggccaaagggaaatgctgactgcttttcatatatttgagtcaaagattttttatatggtcaatgaagactaatataagggcagtgggattttcacagatgcatgccatgttgtcgagagcctcttagattttctcaactgtgagaaagaaaaacgaaaatgttgaagacgttgagtctggagaggggatactaatcactgtccagttgggcactggtgggaatggggaaatggcacaggaatgcaagcctctccaccctaccccccgaactccagccatacactcatcgtttcacaaaatataaatgagttagcattaaatgtttcagagtaaataattccttttcccgaaatgcatgaagatagagtaacagacttctcacactgtatttttagggtatggagaatttagaaggttaaagaattactgcttcaatttttcagttaaaaaaaaatcaggaagctctgttcattcaggctatgcaccatgtgcacagtcaagaattagcagaaaccctctgcatttacaaacactttgtgctataaaaaagtaatttttaaaaagccacgtgtgtgtgtgtcgtatatcnnnnnnnnnnnnnnnnnntctaacacgccaaggtttttgatacttttttacaaaaactacaagagaaaacaaatatacctgtccaaaccatatacttttaaaagagcatttttttttccatacaagctgttgttaatttgggggtaaagtgctgatttgcaaacttcatcaaattgttcccaagtggattctccttgtttgtctccccctaccaaccccaaagttaccatatttgatgtaagaatcaggcatgttagaatgttgtgtcacactaactgattctgctctttttgtcttgtcattcaagttccgttagcttctgtacgcggtgccctttgcagtctggtgtctcttccagaggcgagggggctgaggatggggtgctgcatctcactagctatactggcatcatcttggtaaacattcattcccatgccattggggttgcttttgccaaggtcatccaggacctcctcgattataaatctggtaaacattttcagtcttgctcttccttgacctgaaagctttacaaaaagtaccaatgcccaggtccagcgctggagatnnnnnnnnnnnnnnnnnnnnnnnnnnnnnnnnnnnnnnnnnnnnnnnnnnnnnnnnnnnnnnnnnnnnnnnnnnncagagaattactgctcggtaagtgggatgactggggagtgggagatcaaatactctaacgtctcccagcacctattctagagatcagtggggcagaaaggtagaaataaaaggtggaaagggatgaaatgggtaagtgtgggtgaattagttccaggaaaacggcaatctccactgtggattcagggaaggcgtcactgaggagggctttcttaacagttcaggtcagtggaagccaacttgaggcacacatcgtgcgcggcatcctccggggaggtcgggtcatttcaccccattttactgccgagatgacctaggtccagagacggtaaagagcggtgtacgactcacacaagtcgggggtcctgtgaaccgaggttgagcctggcgggccttcggcccgaggtctttaagcgaagtcaccagacccggggttcaaagcccagaggtaggcaggcggctggctctccgcctcaggcctggagagaacccaggggtatgaacctcaacctcgctcccgcgtccagctggaggggcggagctggctggccccgcctccgggttaaacaaagttctttacagactaggcgtgaggggatgttgcagtcttgttgccacttccgggcgaagag

SEQ ID NO: 1382 - protein, 71 aa, Homo sapien [sequence omitted]

SEQ ID NO: 1383 - DNA, 983 bp, Homo sapien
gccgcattcccggtgtcgacttactagctgcaagcctctgcctgccttcctgcgcgccgttccccgctagtcgctgctgctggcgcgcactcgccgggtttttcctcccacggcctcgagatggtggtgaatgtggcacggaggagccgggccttccaacccggtgggcccgagctccgaaaggccccctcggcagtgagaggggcgggagcccgcgggggccgcgcccttctctcgcttcggactgcgcaacgctgcgctctgggctgacaggcggataaaacggtcccatcaagactgagaaaaagcacaccagctattggcacagcgtgggcagtggggcctacaggatgactgacttagtctacagagatcccggcgtacttaagcaggtagtaatgatggacagatgaagactcttaagatgacagaaggtgatttttctggtgatcgaggacttccggggtaatgacagtgatgaaatgcaggggacctggttgcccccaagtttcctggcagtgtgtgatactgaggaggtgagcttgtttctggagctgtgctttaaggtaaagttgatcagcttaatcctcctgatccctttcccatcggatctgaacactggtcttggtggtcgtaaaaggaggaaaagtaatagtgaagctggcctaaatgttgtaatctggtatatggcatgtgggctagtttcagacaggtttcagagatggttggatctctgaaattgtaaaatgaagtataatcttaggctaagggaaggatgcgtgtgaagctctggagattcatgttacatgtaaagctgtcctcatttgtgactatggacctatggagttgggacaatctctatgggaagcagaaggcaaggaccccggtcattttaggtagaaacaacagcatgctaatgcaaaaaattatgcagtgtgctactgaacttcagaggtgatcaataaaagaagaataaaaagact

SEQ ID NO: 1384 - protein, 92 aa, Homo sapien
RIPGVDLLAASLCLPSCAPFPASRCCWRALAGFFLPRPRDGGECGTEEPGLPTRWARAPKGPLGSERGGSPRGPRPSLASDCATLRSGLTGG

SEQ ID NO: 1385 - DNA, 1483 bp, Homo sapien
ggctcctccttgagggagagagctgaggaggtggcattcttgcttccctgactcacccaaaggaagatttcacagccccttggctgggtggggagttatgctgggaagtcttccaggccccctgggggtgggaagatgctcaatgttcaaaggagatggaacgaggaaaacagttaagcaacgatggactccagggggaaaaccggagaagaagaaactgtaattccagtccgtccacatggcccagcagtgaacgacaattgcatggtcagagagagcaaaagcaccacgccgactgaaagcagctcgaatgtggtggggcagtgggagataatgccctcatctaccaaaacaagatctgccaccttcgcagaccactaaacctcattcctccagccagctccccacccccatgaaggccaactgaccagagagcagggctcccgagggtcgggtcgggtcgggtcgggttgggtcgggtgggtgcctcttaccctgaggctctgccctggactcggagtccacttgctgtcaaagcatgcgactcttctttctgatacttgacatatttcttttcccgttcaattcatggtttctgcccaaacggagccacgtgaggacgtctttggggatgtgtctccaagaaaagtgtgggctgccttcctcaccctggatgcctgtgggctgccttcctcaccctggatgcctgtgggctgccttcctcaccctggatgcctgtgggcagccttcctcaccctggatgcctgtgggctgccttcctcaccctggatgcctgtgggcagccttcctcaccctggatgcctgtgggcagccttcctcaccctggatgcctgtgacttggtttccatgggggcttcctaagctcagggaccccaagcctccatcaaatctaatgacccgccttgtctctgaacacacctgtgttgtccccgagcccctcaccaaccccctctgcaacccggcccacgcatttcccatcctgaagggtccagctcataggccggcccatgtgttccctttacccctgctttgtccctacctggtggggagctgtcccttctgggccctagtgtggcacttcacacacaaatgtgtcctgtgggtggtatctgggcctccccctgcagtgaggggatgaccaatgtgcagagctcactgggcctggatatgggctcgggtggcacagaacagagagaaagtgctccgtaaaagtgagctgcgatgcggaggtgggcaagctcttccctggagggggaagagctctcaacccagagggatctgaccaggaaggttcaccccccctccacccaggaagcccctgcagacagtatgtgttttaggctttgctggccaaatggtctctgccgtgactactcagctctgccattgtggctgcagagtgaccatagaccttctgaaagtgaatgagtatgactgtgttccaataaaactttattgacag

SEQ ID NO: 1386 - protein, 206 aa, Homo sapien [sequence omitted]

SEQ ID NO: 1387 - DNA, 3500 bp, Homo sapien
tcgcatttctgcagtgtttgcactctcaggccccaccatttccccgcatctcttagggagaagttctcgacgtcccacctcccctggaagggtgctgctcccagagaccttcaggccaatggcccaatctcagtgccctcaggggagaggggggtgcagaaaaacagcctgggtcacaaaagaggtgcgagggctgtgagatcccggaggcaccgacgggaagcgagacggagaacaggagggcaggacgggctggaggtgggggatactgcagatggagggagccacggtgggggagggcgtggacctgaccgtcctggcacaaggcggtcgggtgcagacctccaggccctccgggttaaggtgccgcccagagccctcaggccgggggcgcacggaaaccacaggcagggtgcgcgtggagggacggggaaagcggggcgggttggggaaggcgccccgggaacctgaacctcccaccccgcctcagtctcgaccactccttaagccccaccccgccccaggtaaggcgcagtccacccccattcccagtagattaacgcacaggtgggggcgcgctcgggacatagctgcgctaggggacagcgcgcccagcccagtcgcgggggcgaggagcagggcggggcccagcaggaacccagctttgttagcgatgctccccgtgagccacgcgccacgcgtacgcgcttcctcaatggggccgggcgtggagccgcgccctgcgcgattggccaaacgggtggcccacgattggctgagaccctggcccccgcctcctcggccccaggagggtggggcgtgggtgtgggctgcgcggcgcgtgctgcccccggggatcttgcgcgcctcccgaacagccgtgttgtcgccagggccgcgccttccctcccacagcgcgcgctgcgcgtgcgaaggtctggcggctcttgggactggcggggctgcgcgcggggttagggtgggggtacgggaaggctcaacccaggacctgcgtaccttgctttgggggcgcactaagcacctgccgggagcagggggcgcaccgggaactcgcagatttcgccagttgggcgcactggggatctgtggactgcgtccgggggatgggctagggggacatgcgcacgctttgggccttacagaatgtgatcgcgcgagggggagggcgaagcgtggcgggagggcgaggcgaaggaaggagggcgtgagaaaggcgacggcggcggcgcggaggagggttatctatacatttaaaaaccagccgcctgcgccgcgcctgcggagacctgggagagtccggccgcacgcgcgggacacgagcgtcccacgctccctggcgcgtacggcctgccaccactaggcctcctatccccgggctccagacgacctaggacgcgtgccctggggagttgcctggcggcgccgtgccagaagcccccttggggcgccacagttttccccgtcgcctccggttcctctgcctgcaccttcctgcggcgcgccgggacctggagcgggcgggtggatgcaggcgcgatggacggcggcacactgcccaggtccgcgccccctgcgccccccgtccctgtcggctgcgctgcccggcggagacccgcgtccccggaactgttgcgctgcagccggcggcggcgaccggccaccgcagagaccggaggcggcgcagcggccgtagcgcggcgcaatgagcgcgagcgcaaccgcgtgaagctggtgaacttgggcttccaggcgctgcggcagcacgtgccgcacggcggcgccagcaagaagctgagcaaggtggagacgctgcgctcagccgtggagtacatccgcgcgctgcagcgcctgctggccgagcacgacgccgtgcgcaacgcgctggcgggagggctgaggccgcaggccgtgcggccgtctgcgccccgcgggccgccagggaccaccccggtcgccgcctcgccctcccgcgcttcttcgtccccgggccgcgggggcagctcggagcccggctccccgcgttccgcctactcgtcggacgacagcggctgcgaaggcgcgctgagtcctgcggagcgcgagctactcgacttctccagctggttagggggctactgagcgccctcgacctatgaggtaacagccgggaggcagggaggagggagggccgggggccggggtggagggacggggtgggcaggcccggcgggtcgcgcccccaggagcccgcggagccgagcgccaggcccgagcgatggcttcgatttcgctcactcttcatttcccccaaagtttttcaagcccgtgcaagaccggcgtttgtttgtccgggattgcaaaacttcccctcgcggctcagccgccgacgagggaggggtagacgaggggaggggagcggccgtcgggccgttgaggtctctagtgctggcggatcctggggcagattggggtgctggaggcggggtgactttgcattgcaaatcgcgctcccgggccggggcggcagaaatgagtcggcgggcgcggagccctgactcaccgcggctccgagcgcccgccccgcccccgccgtgtctcagaccgagtcgcggcacccacggactcaagactccaaaaccaaccgagcaaacgaaactgccgagttcgcttgggggaggtgcgggcagggccggcccgggcggggtctgccccgggcccgcgcccgcgttgacgcgcgtttggttccccaccttccccccgcagcctcagccccggaagccgagcgagcggccggcgcgctcatcgccggggagcccgccaggtggaccggcccgcgctccgcccccagcgagccggggacccacccaccaccccccgcaccgccgacgccgcctcgttcgtccggcccagcctgaccaatgccgcggtggaaacgggcttggagctggccccataagggctggcggcttcctccgacgccgcccctccccacagcttctcgactgcagtggggcggggggcaccaacacttggagatttttccggaggggagaggattttctaagggcacagagaatccattttctacacattaacttgagctgctggagggacactgctggcaaacggagacctatttttgtacaaagaacccttgacctggggcgtaataaagatgacctggacccctgcccccactatctggagttttccatgctggccaagatctggacacgagcagtccctgaggggcggggtccctggcgtgaggcccccgtgacagcccaccctggggtgggtttgtgggcactgctgctctgctagggagaagcctgtgtggggcacacctcttcaagggagcgtgaactttataaataaatcagttctgtttaccagtggctcctatcacctacacttcccaggtgacggccagacttccgtggtcactactcctcaaaccctgctgcctcctccgtagggtgggtctgggtgagatctgg

SEQ ID NO: 1388 - protein, 368 aa, Homo sapien
MEGATVGEGVDLTVLAQGGRVQTSRPSGLRCRPEPSGRGRTETTGRVRVEGRGKRGGLGKAPREPEPPTPPQSRPLLKPHPAPGKAQSTPIPSRLTHRWGRARDIAALGDSAPSPVAGARSRAGPSRNPALLAMLPVSHAPRVRASSMGPGVEPRPARLAKRVAHDWLRPWPPPPRPQEGGAWVWAARRVLPPGILRASRTAVLSPGPRLPSHSARCACEGLAALGTGGAARGVRVGVREGSTQDLRTLLWGRTKHLPGAGGAPGTRRFRQLGALGICGLRPGDGLGGHAHALGLTECDRARGRAKRGGRARRRKEGVRKATAAARRRVIYTFKNQPPAPRLRRPGRVRPHARDTSVPRSLARTACHH

SEQ ID NO: 1389 - DNA, 1607 bp, Homo sapien
aagctttcctctttgcattttggcatttgaaaactccgaagagcggtttttgttttttatttaaagaagatgatacatatgtgtacccgattcaaaactagagaatagaatttaaaacataattttcaaagtcttcaaatatgcctaaaggtaacaatgtcatcttttaattgccaatttctctaccactttcaaaaaattacttccaaggatttaatgagctccttcctttcaacagaaaatggactattttcctttcagatttactatatgctgtcactccagctttataaccgcatgtgcatacacaaacatttctttctctcttgcaggtggcacaaaccaggaaggggaaatctgtggtttaaattctttatgcctcatcctctgagtgctgaaggcttgctgtaggctgtatgctgttaatgctaatcgtgataggggtttttgcctccaactgactcctacatattagcattaacagtgtatgatgcctgttactagcattcacatggaacaaattgctgccgtgggaggatgacaaagaagcatgagtcaccctgctggataaacttagacttcaggctttatcatttttcaatctgttaatcataatctggtcactgggatgttcaaccttaaactaagttttgaaagtaaggttatttaaaagatttatcagtagtatcctaaatgcaaacattttcatttaaatgtcaagcccatgtttgtttttatcattaacagaaaatatattcatgtcattcttaattgcaggttttggcttgttcattataatgttcataaacacctttgattcaactgttagaaatgtgggctaaacacaaatttctataatatttttgtagttaaaaattagaaggactactaacctccagttatatcatggattgtctggcaacgttttttaaaagatttagaaactggtactttcccccaggtaacgattttctgttcaggcaacttcagtttaaaattaatacttttatttgactcttaaagggaaactgaaaggctatgaagctgaatttttttaatgaaatatttttaacagttagcagggtaaataacatctgacagctaatgagatattttttccatacaagataaaaagatttaatcaaaaaatttcatatttgaaatgaagtcccaaatctaggttcaagttcaatagcttagccacataatacggttgtgcgagcagagaatctacctttccacttctaagcctgtttcttcctccatatggggataatactttacaaggttgttgtgaggcttagatgagatagagaattattccataagataatcaagtgctacattaatgttatagttagattaatccaagaactagtcaccctactttattagagaagagaaaagctaatgatttgatttgcagaatatttaaggtttggatttctatgcagtttttctaaataaccatcacttacaaatatgtaaccaaacgtaattgttagtatatttaatgtaaacttgttttaacaactcttctcaacattttgtccaggttattcactgtaaccaaataaatctcatgagtctttagttgatttaaaaaa

SEQ ID NO: 1390 - protein, 64 aa, Homo sapien
MSSFLSTENGLFSFQIYYMLSLQLYNRMCIHKHFFLSCRWHKPGRGNLWFKFFMPHPLSAEGLL

SEQ ID NO: 1391 - DNA, 2994 bp, Homo sapien
ggcctccgccgccgcctcgggaggtgaggacgaggaggaagcgagcagcccagacagcggccacctcaaggatggaatccgacgtggtaggcccagagcagatactgtccgcgatttaataaatgaaggagagcattcatccagcagaatccgttgtaacatctgtaatagggtgtttccacgggagaaatcgctccaggctcacaaaaggactcatacaggtgagaggccctatctgtgtgactatccagactgtggaaaagcctttgttcaaagtggacagctcaaaacacatcagcgtcttcacaccggagagaaacctttgtttgttcagaaaatggctgcctgagcagattcacccatgcaaaccgccactgtccgaagcacccctacgccaggctgaagagagaggagcccacggacacactcagcaaacatcaggctgccgacaacaaggccgcggccgagtggctggcgaggtattgggaaatgagagagcagcgcacccccactttgaaaggcaagctggttcagaaggctgatcaggagcagcaggaccctctggaataccttcagtctgatgaagaggacgacgagaagagaggggcccagcgccggctgcaggagcagcgggagcgcctgcatggagccctcgcgctcatagagcttgccaacctgactggggcgccactccgacagtagcttggacactgactcttccactgtacaaaagtactgcccagcatacttaaaaagtagatccttgggcataagctaagcaccttatttgcttatcataggctgctattctgtagaaatttatgaagaatgttattgccccagaatatggggtgagagagaactgcacttttttaatatggaaatgaattcatcgtaaagtttaaaatattttgtaaatatggactgcacagtacagggtagaaaactacatattgtgggaagctagattttgcaagtttaatgcattcattggaagcagttctcacaggaagcactttctgaataagacacttgtttgaaaaacagaatggtacaaatagccaaagaagattaaaacagattatttataagatcatttttaacaatatatattagtatgtttaacaatactgtaaacactgaagcaagcaagaaagtataaaatatgtaagatagataattttaattgcaaaatactgtgcccactaaggctagagaaatgggaggctattttggaagatgttctaagtaatggacttagaagaaaatagatatttgaggctcttggtaagatgcacaatagttcagaatttttgaaattggagcaaaatcagtcttattctatctggggctttacaactcagtataatgtttaagtttgaaaagcacttgtcatccctagcatgttaacttgggaacttttgcacatttcatatttctcatttgctgaaattgagtgattaatcttgcaaagtctaggtaacatagtaattggtaattttaaaaatacatattaagggccctgtaatgagatttggcacttggatttttactaaagggacacctgcagggttgttttgtagtgaaatgttttagatcttttgttagcaaacactacattttaattgtactgcttgtttagaattattagcaaatggaagcctccatatttatattttcagtgcataaagccaccttcttgctttacttcagagtaacatgccaagctattttgtgttcactaaatttagctatcagttaaacactgcagaaaatattagctactcaaataagtaggcttctgaaatagttttaactgcaagtgtgttaacttgtgtggtggtttgaagccatttttccaaataaagttattaaacaccactttatgtactgaagcatgaacagaaaaatcaagagctgagcagaccacctcctttatgtaggcaaaacttccatcattttggcttttgttctaaacagaactaaatgacatgcatagcatggtaacttacagatcgcttaattggagtaaaactcagagtaatagagggaaatatgggctcttcagtgcctttttagcttttttgagttgaagacgttcctacagatgtagtttaaacattacaaagtaggcttctttatccaaaaatcccaatgtgtcatagtacacagatagtttaaaatatgtagccacggggaaggggaggcatgtaaatgtcttgaagaggagaaaaagtatgaaagaagatacgatagttacgaataatgtgtatgatgaggacatactttaaaaatgtaattcctctgtacagtaaattacaaatctttagggatttttttgtaataagagaatttatatttgtaatggtctaagaatttttttgtaatgtggtatatagaattttaatttggagcacttataagctggtaagagagactatagcatctgaattatcttggtttatgtttcagcatttcctctagaatttttgctctcaaatatgtgatttaatgaactaaaaacaacactcatcagtcttgggaaatttgaactttgatcaacttaactaaagaaggaagggtagtaagaatttttcaaatacaaatatttgccaattcacagatgataacatttaaggccttcaaaagtaagggtttttccttgtttctccagtcagcttttgtcaactctaatagttttttcataaacattttttatttgtataattgcaacagtttaagaaattatcacaactatttagaaacatttaaaatgttctttttgatataagctatatacttggaaaaatacattggtatctaaaatttgaggtgtgttaagactgctttttgttttaaaaaatggtttacattcaaatttttgaagtgttttatgcttcatatggctaagttgtagtttggcagagttaacagcataagaataaacatgctgtaattttaaaagatgctttgaataaaaatttattttaattt

SEQ ID NO: 1392 - protein, 139 aa, Homo sapien
MKESIHPAESVVTSVIGCFHGRNRSRLTKGLIQVRGPICVTIQTVEKPLFKVDSSKHISVFTPERNLCLFRKWLPEQIHPCKPPLSEAPLRQAEERGAHGHTQQTSGCRQQGRGRVAGEVLGNERAAHPHFERQAGSEG

SEQ ID NO: 1393 - DNA, 5925 bp, Homo sapien
  Unsure 89-112: Unknown base
  Unsure 517-541: Unknown base
  Unsure 2887-2915: Unknown base
  Unsure 4943-4971: Unknown base
gcttccagttgggatggggaaggcctttgtgtgtgtattggggggaggggttaaaaaataattatcccaaactttttaatgtactgccnnnnnnnnnnnnnnnnnnnnnnnnccactataccattttaagttctgacctcaggcctccatttgggccgatggcctcttggaggcttaaagttttctgtaccttgtgatgaatgttaataggtgtttttattatacaaagctgaatgtcatttctcgtttgtagctttctgtcactcattccatcttccttcagacatcaccacgtttctctaaagtcagaaaacattccgttttggtctttttcaaaaaggtcccaaatgctgcactctacacatgaaggccctctcacacagacgtgacgtcctgccagaaagagaatgaatgacagaaaaaaaaaagagagacaaactctaggaacaatgccgattcattccacgcagcagtattgggggtggttcgggggaggggtgtttcggattttcttttnnnnnnnnnnnnnnnnnnnnnnnnnggcagcaaccattaataaatgccaccacattctaccagcacaaggaaacataggcagcactgaaaaaaaaaaaaaagctcatattaattagactgacaatatggccttggaaggctctcccttgtggaaccaagttgccatgggccttgggtgctctgcgataacgggtgtgggttggttttgtttgcaaaatggccaaaaaaaaaaaccggcttccccgagcagctgccctgaaagtaggggtggcggcggcggcgctgagtttatacattagttcagacctacttggtggcattaaactgtttgaatgcaaattcgatttcagattgaacttgttaagggagttaacgagggctgagttcagcaaatgctaaagtgttaatttcaaatatgcaaatttggtactgcagtttgttatgcaatattatatcaccaacccagtatcacaaaaactcatagaagatatcatgtaggccctgggctttgggggggtcccaaacatggtatgcagaaatgtgatggttacaggtcagtacaacctcagtccttagaacccctccacacttcagctctgcacccactttcctgtcatttatttatataggactgtagttttttttagttcgagagcctttcgaagcttaatttatattctttctttgtaccttttttctaaaattaccaaagatattacacaaaggtaaattatgttctctgttttatgctttatctgatgaagccaaatatcctcttattgttgatcaaaggaggcaaaagaatttagaggcaaatgacaagcgataggctattgcaacctgagaaagagaactgctccttcatcgtaaatttagaagaccaagtagataatggaaccaaagttgttacttttttctagtagttatttttcctttttctttttgtgtacctctacagagaccaaaactcattctcttaaagagattttatggggctactgcagataaaaataggacacaatattaaaggagctacagaaggaagggagtcccatctcaaaaaaaaaatgaatgtatgccactgcaattagagtatccaataaaggagacagtttagagtcaggacagaaaagcttccataattgaactagattacataatagtatttctagaaaaagagatatttttagattgtatgccacttttgtttaagaactgtgctgtgatcactgtattaattttggtttatcttggcatatatccttcagtttgtttttatttttaatttttcctttttttccgattaggctttggtcagcatttttcatttaaagaaaagtaacactcccatccactcataagcttggtacaaaaacttctctggcagttacttttgaagcttcactctgctttctgtataaagggcagtctgtggtcacgcaagactttaaaaaaaaaaaaacaaagagcccataaaaacagacaaaaaacttttccaggcagcttcatgatgtgcaggcagtagccagacagggtcatgggaagggggccctgtgcttctaaactgagtggttgctggttagtttggtattcaaaagaggataaaaatctggtagattagttcattctcagcatgtgtagctagacatgagtaaagataacagcatgagaaactgttagtacgcatacctcagttcaaacctttagggaatgattaaaatttaaaaaaaaaacatttcactcagttgcacttagtcgtatgtcttgcatgcttagtctaaagactgtagcaaaaaaaaaaaaaaaagaaaaattagattttacatatctttgcaggtatcacagccttgcagaagaaccaactgaaaaaaaaattctcaggctttacagcaagcaaacttcactatgatttttacaattctgattctgtatcccctgggggttatcccagttgcttctttaggatggggtttattacgttgtacatatatcccgatgtgtctgtgtgaatctttgtcttttttgggggagggcagagggcggttctttttttagatattgttcctaaaaaggaataaatgcatacacctgtttgtcaaaacacctttgctttttgtgcaactgctttatattaacgatactaaaaaaaaatagctttggaaaaaaaactactgtatgtaacggaattgcagaatatgctgcacatgtattttatttagttatccttgctttaagaatattggatgacatttcctgacatgtgggagggagaaactccctaactttttttttctgcttttaaactgtaacatagttgaagatttcttttttctgttctcattgattggagcattttgtacaagttttgtannnnnnnnnnnnnnnnnnnnnnnnnnnnncgtgtgtgttaatctgttttttgatacattcctatcccttgtgtttatcctaccactgccttcctggctatcttaaacaagttcatacatttgaaaagaaaaaaaaatgttgtttaaaaaatgttttctcctgctgcagtaaatattttgcatgatgaaattccagggtcacacttttccaagtttatcagtgaagtagtgattaacaatggggagtgtcaaaactattgaacttttgtataacacaaaaaaaactttacaaggtgccaagatgtaaagaaaatctgttactttttttttctcaaagaaaagcatacattagggaggtagtcccgtgtgtcagacaaatgcactgtcaggaatgaggatccaacctacctgtccctagagtccgtcttgtaagatgagttaggctgccccttggaccagccacaaaatggaatatcaaggcttatgtacatacgtgaagagttaccaccagtcctgccacctttggacagctctaacaccatccccagcatccagtcagacctagtaaagaaaaccttggattcttaacccaagataggctgtaaatcactagcttttttttcctcatgaaaaaaaatagagttaaaaaatatttcctctcttttccatattccagctgaactccgtttccaaaggcacaaagaagagtgtgcttattcagattttgaatctttttggtaccttttggttaatgacatagcctcctgaaattctggatgtcttcaaagtcagttttgcttctttatcctgaaaatcagatttacaatgctgaaggcatttcttgggcccagtgtagctcacgcaatctctgctacccataagccttgatgaagatgatacagtccggactgtgagcatggtgcttcatgtatatgtgctgccagtaacaagaatttttttgttttgttttgttttgttttgataaggcataaaagaaactcattccttgacatcaactgtaattccatcattccatgtctgcggatacagacaataaaaaaaatgttgtgtagtcagtactaattactgacattataagcattctcaaatgcaataaaaatgctggttgttcacgctggtagtaaaagttgccacagcctaagtttgtttccctttctgacctgctgatattgtatgttaggcatatgccttaggtttatcaccagctgcttccaatgcagaattaaaatcaatcttaaagctttcatgatcagggaaggctgaagctcttatcctcaggatttccaagtgaaagtatccacttagagaattgggaagtaaaaaaaaaagagcaagagatgttatcttttctcttgaggaagcacactcttatttttttcatcaaattttataaagaaaaacaaaatgtttaataactagcattaagagcaaactaaaatttcagaggaaagcaactttcatgaataattcattgaaagatttcacagtctggcaagattaggtcatccaaataaaagtgctaatggtcaaaaacatgcaccgtctataatattctcatcaagaaatctttttgcatataatgataaatgcttagattagaacaaatgattttataaaaatattctatcaaaagtatgctagataattgcattcattgaagaaaacagaacttcagtacctaaatattccagaaaaaccatcttaattttgagattttaaaaaaataattagatgcatttaggaaatgtgctgtttctttttaatattactctatagtatatattctagggattaatgaatttgagcatcacctttcaataaaaaattaaattgccaatatgaaagcagtattttaagtggccaaaccgtggtaacataaaaccattacatatataattcagagcacataattcagggcaaaggatgacttgaaaattaacctcccagtctttattctgcaaaacacccaccgatgctgaggatacaagtgaacattctttcccagcattgttttgaaaagcccatattagcaaagtnnnnnnnnnnnnnnnnnnnnnnnnnnnnnaacaagtagattttgctattaagttgcaaactagtgtcctctttgaattaacaattatgccctatctagaaaccccttagtctcaataattagcaaaacatttgaacctttaattctcacctggctactgagactataatcttagggttaattcaaattcctgtaattaccaggcttaaacctaaatactgcttacagcctatccattagtaaccatttaaaaatgtacagatacttcttttaatcaactggaggacctaaaccaagtatgacgatatgttagtgaagattttgctggttgaggcatagtacattttaacttatatttcaggaattgttctcaagcaggaacactcttttacatatttatttcaggcttgtcactctcataaacgaggcagcaaacccaaaatattggctcttcttataaataggcgcctttatataaagaacataaaactcttaagactaatttcacaccaacacaggcagcttcataatagtaaccacctctccctccccactaaaaaagataaaaacaaagtataattagtctttcttattagatttttgtctttgatgatattacgtatttatgtgtagggtagtaatcacaatttatccttcatcttcattgtagttgaatcaaataaaagtattctttattcaaataatgtgaagttgggtgtctcaaaccttcatttaatgaattgatgaaaggtttaagacaaaattcacgttggagggaaattaagttacatacaaaaacactggttttaactgtgggacaatatttggattagaaaaccatctctagatataacctacttatatttatttttaaatggtattttattttttaaaataacaaaacccaatgttgtcttatttccactttgattgtaaaatgacattcaatgcttaataccaaaatatatatctatattcacattt

SEQ ID NO: 1394 - protein, 64 aa, Homo sapien
  unsure 30: unknown amino acid
  unsure 31: unknown amino acid
  unsure 32: unknown amino acid
  unsure 33: unknown amino acid
  unsure 34: unknown amino acid
  unsure 35: unknown amino acid
  unsure 36: unknown amino acid
  unsure 37: unknown amino acid
FQLGWGRPLCVYWGEGLKNNYPKLFNVLPXXXXXXXXHYTILSSDLRPPFGPMASWRLKVFCTL

SEQ ID NO: 1395 - DNA, 1818 bp, Homo sapien
acgaggctgagcgggacctgcgagcagcgcgggcggcagcccgggggaagcgtccgggaccatgtctggagaactaccaccaaacattaacatcaaggaacctcgatgggatcaaagcactttcattggacgagccaatcatttcttcactgtaactgaccccaggaacattctgttaaccaacgaacaactcgagagtgcgagaaaaatagtacatgattacaggcaaggaattgttcctcctggtcttacagaaaatgaattgtggagagcaaagtacatctatgattcagcttttcatcctgacactggtgagaagatgattttgataggaagaatgtcagcccaggttcccatgaacatgaccatcacaggttgtatgatgacgttttacaggactacgccggctgtgctgttctggcagtggattaaccagtccttcaatgccgtcgtcaattacaccaacagaagtggagacgcacccctcactgtcaatgagttgggaacagcttacgtttctgcaacaactggtgccgtagcaacagctctaggactcaatgcattgaccaagcatgtctcaccactgataggacgttttgttccctttgctgccgtagctgctgctaattgcattaatattccattaatgaggcaaagggaactcaaagttggcattcccgtcacggatgagaatgggaaccgcttgggggagtcggcgaacgctgcgaaacaagccatcacgcaagttgtcgtgtccaggattctcatggcagcccctggcatggccatccctccattcattatgaacactttggaaaagaaagcctttttgaagaggttcccatggatgagtgcacccattcaagttgggttagttggcttctgtttggtgtttgctacacccctgtgttgtgccctgtttcctcagaaaagttccatgtctgtgacaagcttggaggccgagttgcaagctaagatccaagagagccatcctgaattgcgacgcgtgtacttcaataagggattgtaaagcagggaggaaacctctgcagctcattctgccactgcaaagctggtgtagccatgctggtgagaaaaatcctgttcaacctgggttctcccagttacggaaaccttttaaagatccacattagccttttagaataaagctgctactttaacagagcacctggcgtgggccaagtgcctgatactcccttacactgaatcatgttatgatttatagaaatacctttcctgtagcttttatagtcattgtttttcaaagacgatataccagccctcacccaggttttaaaaaagcactggtaggcatagaataggtgctcagtatatggtcagtaaatgttctattgattatcaatcagtgaaaaaaaaaaaaaaaaaaaaaaaaggagattataaaagggatgatgaacatggagctgcatctttttaaacgttgttttttgatgcttcagactcttaatgcttttatataaagctatcaactgtatgttgatcacagtttataagaaagaacaaatcaagattggcaatccttgccgatcttttagaaataccttttctggagaaaaaaaatccacatgaagtgcaataagcttataaagctaagtagttattaatatttctattaacatgatacaaaggatgatgattgtaagtgtttactgactggcagcttttatttcagtattagcacagcgtcttgccagtgttggaggccatgtattatttcagttcaactggatgaaatgttaaataaactcagaatgaaaaaaaaaaaaaaaaaaaaaa

SEQ ID NO: 1396 - protein, 322 aa, Homo sapien
MSGELPPNINIKEPRWDQSTFIGRANHFFTVTDPRNILLTNEQLESARKIVHDYRQGIVPPGLTENELWRAKYIYDSAFHPDTGEKMILIGRMSAQVPMNMTITGCMMTFYRTTPAVLFWQWINQSFNAVVNYTNRSGDAPLTVNELGTAYVSATTGAVATALGLNALTKHVSPLIGRFVPFAAVAAANCINIPLMRQRELKVGIPVTDENGNRLGESANAAKQAITQVVVSRILMAAPGMAIPPFIMNTLEKKAFLKRFPWMSAPIQVGLVGFCLVFATPLCCALFPQKSSMSVTSLEAELQAKIQESHPELRRVYFNKGL

SEQ ID NO: 1397 - DNA, 4341 bp, Rattus norvegicus; identical to SEQ ID NO: 987

SEQ ID NO: 1398 - protein, 190 aa, Rattus norvegicus [sequence omitted]

SEQ ID NO: 1399 - DNA, 1869 bp, Homo sapien
gtcacccccagcgggcgcgggccggagcacgggcacccagcatgggggtactgctcacacagaggacgctgctcagtctggtccttgcactcctgtttccaagcatggcgagcatggcggctataggcagctgctcgaaagagtaccgcgtgctccttggccagctccagaagcagacagatctcatgcaggacaccagcagactcctggacccctatatacgtatccaaggcctggatgttcctaaactgagagagcactgcagggagcgccccggggccttccccagtgaggagaccctgagggggctgggcaggcggggcttcctgcagaccctcaatgccacactgggctgcgtcctgcacagactggccgacttagagcagcgcctccccaaggcccaggatttggagaggtctgggctgaacatcgaggacttggagaagctgcagatggcgaggccgaacatcctcgggctcaggaacaacatctactgcatggcccagctgctggacaactcagacacggctgagcccacgaaggctggccggggggcctctcagccgcccacccccacccctgcctcggatgcttttcagcgcaagctggagggctgcaggttcctgcatggctaccatcgcttcatgcactcagtggggcgggtcttcagcaagtggggggagagcccgaaccggagccggagacacagcccccaccaggccctgaggaagggggtgcgcaggaccagaccctccaggaaaggcaagagactcatgaccaggggacagctgccccggtagcctcgagagcaccccttgccggtgaaggatgcggcaggtgctctgtggatgagaggaaccatcgcaggatgacagctcccgggtccccaaacctgttcccctctgctactagccactgagaagtgcactttaagaggtgggagctgggcagacccctctacctcctccaggctgggagacagagtcaggctgttgcgctcccacctcagccccaagttccccaggcccagtggggtggccgggcgggccacgcgggaccgactttccattgattcaggggtctgatgacacaggctgactcatggccgggctgactgcccccctgccttgctccccgaggcctgccggtccttccctctcatgacttgcagggccgttgcccccagacttcctcctttccgtgtttctgaaggggaggtcacagcctgagctggcctcctatgcctcatcatgtcccaaaccagacacctggatgtctgggtgacctcactttaggcagctgtaacagcggcagggtgtcccaggagccctgatccgggggtccagggaatggagctcaggtcccaggccagccccgaagtcgccacgtggcctggggcaggtcactttacctctgtggacctgttttctctttgtgaagctagggagttagaggctgtacaaggcccccactgcctgtcggttgcttggattccctgacgtaaggtggatattaaaaatctgtaaatcaggacaggtggtgcaaatggcgctgggaggtgtacacggaggtctctgtaaaagcagacccacctcccagcgccgggaagcccgtcttgggtcctcgctgctggctgctccccctggtggtggatcctggaattttctcacgcaggagccattgctctcctagagggggtctcagaaactgcgaggccagttccttggagggacatgactaatttatcgatttttatcaatttttatcagttttatatttataagccttatttatgatgtatatttaatgttaatattgtgcaaacttatatttaaaacttgcctggtttctaaaaaaaaaaaaaaaaaa

SEQ ID NO: 1400 - protein, 252 aa, Homo sapien
MGVLLTQRTLLSLVLALLFPSMASMAAIGSCSKEYRVLLGQLQKQTDLMQDTSRLLDPYIRIQGLDVPKLREHCRERPGAFPSEETLRGLGRRGFLQTLNATLGCVLHRLADLEQRLPKAQDLERSGLNIEDLEKLQMARPNILGLRNNIYCMAQLLDNSDTAEPTKAGRGASQPPTPTPASDAFQRKLEGCRFLHGYHRFMHSVGRVFSKWGESPNRSRRHSPHQALRKGVRRTRPSRKGKRLMTRGQLPR

SEQ ID NO: 1401 - DNA, 1263 bp, Homo sapien
gctgtggacgaagaggcggcctcggtggtaagtggcggccgctgggacccagccaggtaccggtccggctcggccctgcccctttccggccgctctcactccttccctcggcctcgagttcctcgtgggcccgtgggggccgccgcggggtcggggctgcgaggcagcgcccgccgttccatggtaagcggtgctacgggacgttcggaaggaaacctcgctagagcaggggacgcctgggctcctggctgaccacggggcctttgcacggccagggctttgcgaccgcagtgtcttccttctgtccccggtcgtgcgccgtgcccctcagcgcggctcacgtttcggaacacgtctgcctttcatgcctcccgaagagcctccccgcatcccgtgccccctgctcgctgctgccgctgacccttgggcgctgcgctggtccagagcgtgttgtcctctgacgccgtcagaacctgagctccctgcgagctgggactccgccgtgtcttcattgcctccagtgcaaagcaactgcttgcaagagaacaaaagtgtgttcaggtgcacagagtagaaaattcaaggagcctgaaagggtatttggtgaagacttgatgtgtttttcccagtcctaacctccaaggcccagttctcccctggggcagagggaaacccgtttcttacgggtctgcaaagaaagtctatgcaggaacatctacgtgcgtttctgcaaaaggtcagttactttacttggggctcttatacttaacgtagctcggagagcgccccatgcattcagatacaggtgggattcctccggaaacggagttttatagcaccagactttatcccctttcctgtagaaatttagggtttttgctgtcttttataacgaacaatgctagcttgactattgcttgtacaaaccgttttttgcccaagtcggactattttcttaggttaaattccttggtgcagaagtgcgagggctgtatttaggcccctaaaggggtggtaccaaatcgccctcccccaccagcataagagggggccggcgacacccttgcccaagctggattttgcagacctggtaggcgtgagatagtatttcactgtagcttgtgtttcctgtaagtatagtcgaacgtcgtgatgttcctgttacatctatgttacgttgatcattgttaccactgacagtcgtttcgagattggaaaatatgtttattataaacgtttgactatttaaaagccatttgtatt

SEQ ID NO: 1402 - protein, 83 aa, Homo sapien
AVDEEAASVVSGGRWDPARYRSGSALPLSGRSHSFPRPRVPRGPVGAAAGSGLRGSARRSMVSGATGRSEGNLARAGDAWAPG

SEQ ID NO: 1403 - DNA, 572 bp, Homo sapien
aacaactttcttttattaaaaatgtacataagtaaaaggaacgtggtttaattgtgcaaagagtaagaaatacagatgagcaaataacacgtattaaagccacctacgatataccacccagaagtaaccaggctgttgaatttttagagactggggtgcaaacacattttttcactcccttgtgcatatatctgggagctctgccatatacagacacagacgcggtgtccacaggcgatgcctctgctgggaatgctgcaagcaggagtctatcctttcctggtactggctcgggggccctcctcagcgcccaggtcactctagcatccaggagtccaaaggcccggctgtgcaggctgcagaggtgatcttggtgtgttttcctccaataggctacaaactctggcacccatggctggtggctggcattcaactctccagcagccagggagtccattttcttgtttctctgctggccatcctcaggacttgcggcggggagtggggggcccagggtgtgctgccacctcgcccggcgcgggttgcggccccagggcccgcgctccaggctg

SEQ ID NO: 1404 - DNA, 2306 bp, Homo sapien; identical to SEQ ID NO: 1120

SEQ ID NO: 1405 - protein, 398 aa, Homo sapien; identical to SEQ ID NO: 1121

SEQ ID NO: 1406 - DNA, 709 bp, Homo sapien
atgtatagtattgctcacgttagcagttttctgtaaggagggcaagtgtcaggataataggtggactttttactcacctattttaccacaatctcaccctgcaggtgatggtcaatgcttgctgctccatctttattcatcgttaatgttaatttatgacaactcagggggaaaaacataacaagcctagtttggttacaggtacacacaagcttgaatatttctctgcactgaaatgaaagtggcatagttcatcaccacctgctacattttgtagagcatcttatcagccatagaaataggacaatctataaaactttggggagggtgggggaggaaatgacaaagtgtctgtcaaaaacaggcataatctaaaacaaggtggatgtagcaaatctctgtcactgcttgagaactttgagcttgtggcagttttgcagacttacatgacttcagcactttacgacatattttttactatgaatgttcaatacaatttaatatttataactgatttctgagggatctgctccatgtctattctgttatctgcatgaaaacaaaatgtatgccaatttcagtatgtcaataatcaaggttttaaatgtttggaagaaaatacaaacaagattgctgatctgttctgtattagtgacattctggtacttctagatttgcaataaatttatggattttttatttaaagaga

SEQ ID NO: 1407 - protein, 59 aa, Homo sapien
CIVLLTLAVFCKEGKCQDNRWTFYSPILPQSHPAGDGQCLLLHLYSSLMLIYDNSGGKT

SEQ ID NO: 1408 - DNA, 1296 bp, Homo sapien
gaagttttactatgtttaataatttagtgaaatttgggctatgtgtttattgattcagctcaatccagaggaaaattttaaaggcttacagccttaggattataggatactatataatacttttggtacagagatagaattaaataacataaaaatcaaaaatttattaggctaaaattttgagggagaagtggtatgaaaatacaaattcaaggagtaaaaggaaaagtggggcattccttgctactaaaaattgccttgttccaggtaagactgatcataaaaaaatggccctgttcataaaatttttaaaaagatcatagtatctatcaaataacttatattaagaacctcctgggctaaatttaaaaagtaatacaacagttttatttaaacatgtagtgtctacggtatgccagcactttgcagctatttataatgagaaattttagatgtcaatatagcaatgtgcaagaagatagagattttcaaaattcacttaagagtatctgagcataaaatgttaagattgctgatcggatgtgagggcgatctggctgcgacatctgtcaccccattgatcgccagggttgattcggctgatctggctggctaggtgggtgtccccttcctacctcaccgctccatgtgcgtccctcccgaagctgcgcgctccgtcgaagaggacgaccaaccccgatagaggaggaccggtcttcggtcaagggtatacgagtagctgcgctcccctgctggaacctccaaacaagcttccaagattgctgatctagggccactaagtgatgaagcaaaaaggatggctaaaaaggacctcaacccttttgactttaaaaggaaaatagcttaaccttcaacctgtgtgacatttaactttttgaacccaaccgtaaaagctatcttctaaccaacaaaaagttaataattacatttggaattatacagaattagaaaattggcatttaaaaatactcaataatttgtccctggtttttaattttcaaaatattttctttttgaagagccagattccagtgatcctgcctctcagaaatttccacatttcttatttttcattaggccttaagaagctgcatttgtaaacttgtgtttcattattaaagcttaatttattttttatataaatagtatgtgctttgtgtacatagagaattaagtgaatgagtcacacagatgttggctgttgttaatgtgaaaattaaacagctgtatcacattttgaaaaataaaagtttcatctgaatgaatatagcaaaa

SEQ ID NO: 1409 - protein, 16 aa, Homo sapien
SFTMFNNLVKFGLCVY

SEQ ID NO: 1410 - DNA, 6480 bp, Homo sapien; identical to SEQ ID NO: 52

SEQ ID NO: 1411 - protein, 289 aa, Homo sapien; identical to SEQ ID NO: 53

SEQ ID NO: 1412 - DNA, 1701 bp, Homo sapien
aaaaaaagaaaaaaaaataagtgagctgaactcacctgaagtggtttacttctgtgggttaagaagttctagtcagtgttcatagtcgtttcgttttgataattgttgaaccaattttgtttttaaaacctttagactctgaaagtaatattttgactaagaatgtaaatatttccaaactaaattactcgggaagtaaacgctttttttaaaagtatttttactggttttataccaatattatatgcagaaatcacaggatgaatttagaattaaatctcaattagttcactttggcctagatttatgaaaaatgcatgcctcgtaaagagtccactgtattcacgagtaaagttgcttttagtgttcacttgatgacttggagagtaggaattttgcaaaatctgaatttaaggaaattctttaggataaccatttcaaaaaataaaattgctatgcaatcttgaatattttctcttttgcctcgtaaaatgaaaatgcattcacagtttctgtaaattatttagcagccttaaagtttatcaaaaaattgtccagattccacgtgcagcatgcttggccctgcatttaatttaagaaggattaataataatgctctgaatttttcgaaagggattctcctaaacccacccacttctcttgcccaggctgctttttaaaaatatttttttattttttacttatttttaaattttctctttttatttatttttggttttcttgttagccccctgttatatgggagaacgaaaattgttatattttgaaagtacttattacattatttttattttagtatcttgatgctcctgtcaaaagggaaatgaggcttttaaaaataaagtaccttaattctttattgactttttgccctaaattgctaggtgtgacccagcaatcttttaggaagagattttacagtggtgctttatttatatcaataatccagtatagttaggctgttcattcctcataatagagtacataacagaaaagtgggactttcacattttcatatttaggcacgttccaatttaattccaaaaatactctgtaattctacatctaaaaaaaccgattccctaattcgaatttattggtaccaaagctctctttggctatagacaattaagagttgaccttttaagttaatgtatatgcttaaaaacagttttaggaaaatatttggtagacaaagagtttcaactttaaatgttcactatgtcatttagtgtccaactttacggataggttgactatctaaataggcatttttagtcattaaaaaaaatctagtcaccaggaggatccctataactcaaaataacttgtttgtaaaagaaaatttgtttacttacccattagtaagttcctgcatattcattataagatggcaaatcaaacttttctaggatgaagacagcttatttttaagttgtatagtcttagttggtttagggtctcaattttaattaataaaatacttggtttttatttgcttgtccttttgaattcctgttttaataattttaaaatgagcacaaagaatgttgaagttcagattaatctcttctgaatgatgtttttttcctctgtgatgagttgtttctgacttttttccttttgtatttgtaatgttgattaagatgtaaaataaaaagtgtgcctgattatttttgc

SEQ ID NO: 1413 - protein, 27 aa, Homo sapien [sequence omitted]

SEQ ID NO: 1414 - DNA, 1264 bp, Homo sapien
gcgaactggagcgggaggcggcggccggagggcccaggacagccccgggagggcggcgaggcggagcaggagcgccccggctccggccacattctcagagtcaggaaaaggggcgagaggccacatgtctccctctcgcccaactgaaaacgaaacggcgctccagcagattgggtggaaagagctgggtctcttttctctgtttttcacgctagaaagggcttgtaaacattgttccttttaaaatgacctaccccaggcatttgtttgggcacacttctgtcctggggtcatcgttcctaggtggcttcggacctgggacttttcctgtatctgcacattgtcgttttatacacaattgccaaggtgggactgctttcaactttactgtgcttgaagctgcagaggttctgccctgatgtttcctggaataatgctgaggactgcctttcgggtagccgccctattcagttcacttcatctcggaaatacctgacccctgccttggatccagcggccctcctgagagctgaggaaggaggaaatcctatgtgtctgctcccggagctgccacaacccatcttcccacaactcggaacttggaaaaaggaacccaggacacgactttgcttttcttttggacctagttggtgattatactctgtctcccatggagaccacgtcttgcatccttccttctatatgggatttaggatagaaattaaaaagaaaacatattattttgagtcttgatttggagaaaggtagtattcaggaggaagtaggctatgatacacatagaaaatttgaggacagtgttacttaacaaggacatttctgtctctgcagaagtcacagcttggaggaaaccagtttgcactatttgatgaggaatttggccaccaaaccactgatactttcccaaaggtttggcagaaattgttttttgagtggctcaccagagtacccagaagaatcagtatggaattagaggacagtggcctaccctaaataaagacatgagtgatgtataaagtctagtgtcaatttattcagaaaatatcaaaattattctgggagctatgggtcaaagttgataggcacaaacaaacaaaaacgaaaggtattttaaattcacagcttggataagtaaaagggagatgttgtcatttctcttcttcaatccaactttagattttcaagccggaaaaagggtaattagaagttagaaattgttattgccagaaaatagctctaaaccctg

SEQ ID NO: 1415 - protein, 80 aa, Homo sapien
RTGAGGGGRRAQDSPGRAARRSRSAPAPATFSESGKGARGHMSPSRPTENETALQQIGWKELGLFSLFFTLERACKHCSF

SEQ ID NO: 1416 - DNA, 1601 bp, Homo sapien
tcacattctatctgtttatacgaaggttgtagacacacagcgtatgtacatatgcctagttgctctcattcctttgtttcacatctcaagcctaacccagactgaaaaggttttgaaggctgagattattcatcaccccatcattatagaaagcagggctggcccaaggttctcacagtgggagcaaggtggattttaactctgatcagtgttgtagctcaaatataaaaagaactgcagcacaaaagtcacaaggataaatgatcccctcgttcttctcccataaaaataagcagccaattgaaggtggaagtcagtacagtgcggcattcccagaggcgacagaacctaagattccatttctaaagacactgctcaacaagaagaccacctgggatgtcttacataaaaccattggcctggcagcttttggctgagttctctattctggttcaagccagcatcacagcctatctgtggttttaacaactgatggaatttgtattttgagaaccctcatccgttagcatgaagcaaactcaaagcattgttgctcatcagttgtcatctgtttgagaaagattttgatttgtttacttgtagtgaagcttgaccatacttctccaggggctttttaaaaagatgaatgtgtcagcttgtagatttgtccccatgaatgaaaccacaagcaaattctcttctctcttccagcctcccttcctccctcttgtttcttcagtggccatctgtgcattatgttcccattgccaggccctcttcaagcagcttatctatgagtgaattcagaaacttcaaattataaaggacacccagataattggcctgttctccaaagtatctgtcccctgtgctgctgccagatttccttcttaatgaatacatccagtgacagtgggattcttgagcttgtccgtatctgtgagaaaatgagctctcctgctttgtaacagcttgtggctcagggaaaaaaatgacagccattgcacaagtttcctttgaatgtagttttctttcccataaatgatactttgagaatacagttaaggggttattagttttctatttcatgcttggcctgtgtgtgagaataacacaagctgtcactgcaaatcagtagctaaaaatgctttgtctggttaatgtgaacatttaatatttggctcaattaaaaattaaccgatgaaagtacatgtcattggaatttgaaaataccttttgtacggaatacttaaagggcatcacccatgactaaaccagtgcttttaaaatatggagaatatggggaaatttaatatgagttgggatacttgactctttttttaaaacctctctacctgtttggcacaacagggtattgataaagagtgggctcattgttatggcaaaggattcacttgcatctctgtgtttttaagtgggtaattgtttttttgcactcagtcacatgattaaagcagacagaacaagagatcagttattcatttataccatacttttaaaaaaatattgagccaggccctggggaagtgggaagtgagagccagagcggcgtggctgatagtctagggcagtgctatcca

SEQ ID NO: 1417 - protein, 65 aa, Homo sapien [sequence omitted]

SEQ ID NO: 1418 - DNA, 1169 bp, Homo sapien
cttctaatcatttctagaatgcaaattccaaattcaaattgatagttttcattacagttctctgtctttcccatctatcttaagacaggagctttccctccctccctgcacctggcccccttctcaacaaagatatttctacaattattaccacttcagccactgcttctaaaacaaagaaggaaaaagaaagtcattcatgaagatgtaaactttgtcagggtaagaacattttttactcatggccaggtgataagatatcaagagttaggggtgaggacagataccaagggtggagaattttcactaaaactagtaggattcttgcttaaactggattctataagacagaaaaggaagcccaaggtcagggtctagtggaagagaaggctccggggagcccgacctgagtttgatctaggagagtctttgtcaatatcctgtagaatatgaccttcacctcattttcttttcctcaagtgtatctggactgtatttggccttttgggcttccaggtgacttttagagtaagtttatcaagatctacaaaaatagctactgagattttgatttgaatagtatttcttcctgataatttctgagtaaaattcattttaaggaagtaggaggggcagtggcctgatgaaaagcaaaaatgaagaaaagaataaggaaagacacagttttgccatcaccagccagtgtttagtgatcttaaaatagctgcttttgtttttgagcatcatttgttgggtatggagttgcagaagttgggttgagggacactggcttctagaatcaaatattggcctccatagagtgtttctgtacagtgagttgggaggatgggcaggggccactgaggactgtggcgtgtccccacgttagagtgtatctcacacagagcctgtcctgaaaatatagttatttttaaaaagtgtttccccctccttttcattggccattttctcttttactactctttacctagcaaagggtgggcatgagaaacctggtcagtggaagagaaagccattttgcaacagtggttataggggtgggagagtaaaatttcctggttcctggggaagctaagcccattggtaggaccagacttttgtatgtgtgtttcttcctttagtcatctactaaggttaataaatacctt

SEQ ID NO: 1419 - protein, 14 aa, Homo sapien
MCVSSFSHLLRLIN

SEQ ID NO: 1420 - DNA, 1582 bp, Homo sapien
  Unsure 146-168: Unknown base
gtgtttgtagttctgtccagctcacattttatcttcatactttgagtagcctccttccatgaatggatcatccagtggccgcacttaggttctcctatgaagatttttgttgtattgtacctcagaaccatctccatattctctannnnnnnnnnnnnnnnnnnnnnnattgaatagaagtatttactagatgaggaggaaaaccctaaaacaaaacatgaacataaaatatttttaaaaggaagacatacaaacagacactataaccaaataagatgacagaattaaggccttatgccacagccagagttgaaaaatgcagaaaaaaagtttaaaaacaaggaattaaagccaaacctaacttttatcaaaataaatgtaaaagtgatgaaagaatctgttaagatatcagattgtaatataaaagatactagaaacaaatgccaatagaacacttaagtacattttatatattcatccattagaatatatagctgtcagaatgatagaagaattacatatgtgtgcaaaagtttttgtatccatgtggaaaacacaggaagctaatagtactgtttttctctggagtgggtgtaagggtagagacttaactctttacatccttatggcagccttcgaataccttttaactcccagttcccttaactgggggtgtgtatcctagaatcctcgacccattagaaagtatattgtagacatcatactctttaccctttaacactacacatgcacttcataagaacaagcatgctgtcttacccaagtacagctatcaagttcagaaatttaacattgccataatactttacagtccatatttcaatttcatttgctgttttattggtaatttttttcagctccacgatccagcctaggatcatatgttgtattgccataaccctctaatctggagcagttcctcagcttttctttgttttttataatagtaatatatttgaaaaatacaggacagctaaaggatagagtatccttctatttgggtttttctgatgtttcctcatggttagattggggtagtgcagtgagggttgaaatgctgtaagtgatatgtattgcaggtatacatccagatgcacagaatgtccatttgtcccttattggtgatgctaattttgatcacttgggtaagatgtccagtttctccagtgtatcgttattgtttttccttttgcaattagtgggtaatttgtgaggagaaactttgagaccttgttgacaattctgttcctcatcaaatctacccctcctaggtttagcatcctttgacgattcttgtctgaataaatttttactaggatgtttccaaaattgtgattgttctaactccattattatttctgtattaattagtcatcattctactgtaaggaagaggtttccctttatcatcaacttcgagtaagtacttttttctgagccatttgaatattccttactagatgtggtgcctctttaccccaattacttaagtttgtatttccaaagaacaagggtgttttcctgcatagccatagcacaattaccaaaatcagaaaattaa

SEQ ID NO: 1421 - protein, 60 aa, Homo sapien [sequence omitted]

SEQ ID NO: 1422 - DNA, 3032 bp, Homo sapien; identical to SEQ ID NO: 1051

SEQ ID NO: 1423 - protein, 134 aa, Homo sapien; identical to SEQ ID NO: 1052

SEQ ID NO: 1424 - DNA, 618 bp, Homo sapien
ggtagcgactggggctccgtattctgttcactggagtgggttttatatatacccaataaatagaagtgtgactggcctgtccaatctcgaagtcagaaaagggccatgggtagcatcacatccttagagactggatgcagtcaccagactttgaggaaagagggaaattcatcccaacctgtcatgctagctaagagagcaaaaagtcaagaatatgaacaatgtgacctaggctctgaaagctgaccaagacaccatctaaataaacctggactgacaatgaaaggactttcgttctcccttaaaataatgttcaaaatagcaaggaaatagagcttcagatgtgtcttgtgtcacctggtctttcatgtgacagtcaaagatccacaatgtgaaagtgggattaacccatctgtgaagttctagtctgtgcagtcacaattgaccactgcaggttttaacaagaggaccctgtggggacacaacagacttcaattctttagccagcttttccttggctcagaatatggagagagctggaggccctccaaaccagaggatgttcgctggtcttcccaggagagaaatgaactatcttttgtaaaagtaagtttcaaa

SEQ ID NO: 1425 - protein, 41 aa, Homo sapien [sequence omitted]

SEQ ID NO: 1426 - DNA, 902 bp, Homo sapien
gactcttacctacttcggggcccactttgctgtcatccgccgagcgtccctggagaagaacccgtaccaggctgtgcaccaatgggccttctctgcggggttgagcctggtgggcctcctgactctgggagccgtgctgagcgctgcagccaccgtgagggaggcccagggcctcatggcagggggcttcctgtgcttctccctggcgttctgtgcacaggtgcaggtggtgttctggagactccacagccccacccaggtggaggacgccatgctggacacctacgacctggtatatgagcaggcgatgaaaggtacgtcccacgtccggcggcaggagctggcggccatccaggacgtgtttctgtgctgtgggaagaagtctcctttcagccgtctggggagcacagaggctgacctgtgtcagggagaggaggcggcgagagaggactgccttcagggcatccggagcttcctgaggacacaccagcaggtcgcctccagcctgaccagcatcggcctggccctcacggtgtccgccttgctcttcagctccttcctgtggtttgccatccgctgtggctgcagcttggaccgcaagggcaaatacaccctgaccccacgctctccagggcagaagtcgcggtgggctcagtgggtgccctgagcggggtctctcagactgacgtcaggccttggtgggctgcactctcacctggaggctccggggaagcatctgcctccaggaccattcaggctgttgacaagtcaactcctcatggctgtaggactgaggttcccaagtccttgtccctggtcctgtggtccctccaccttcaaaccagcaatggtgcattgagcaaattgtggtcaaatatacatcacatcaaatttaccatctt

SEQ ID NO: 1427 - DNA, 1108 bp, Homo sapien; identical to SEQ ID NO: 1183

SEQ ID NO: 1428 - protein, 198 aa, Homo sapien; identical to SEQ ID NO: 1184

SEQ ID NO: 1429 - DNA, 3067 bp, Homo sapien
gaggctactaaggtatttggctattataaataaaatagtgatgaacacgtgtacaggtgtttgtacggacataagttgtcatttctcttgagtaaatacctaaaagtgggcttgctggagttttactacccttggatgctgctgttgacatggaaaagattgaggaacaatttgctaatctgcacattgttaaatgttccttaggaaccaaagagcccacttaccttcttggtatagacacatcaaagactgtccaagcaggaaaggaaaacttggttgctgttttatgttctaatggatcaatcagaatatatgataaagaaaggttaaatgtactacgagaatttagtggatatcctggacttcttaatggagtcagatttgcaaattcctgtgacagtgtatattcagcatgtactgatggcactgtgaaatgctgggatgctcgagtagccagagaaaaacctgttcagctcttcaagggttacccttccaatatttttatcagttttgatattaattgtaatgatcatattatttgtgctggtacagaaaaagttgatgatgatgcattgttggtgttttgggatgcaaggatgaattctcagaatttatctacaactaaagactcacttggtgcatattcagagacacatagtgatgatgtcactcaagtacgtttccatcccagcaatcccaacatggtagtctcaggttcatctgatggcctggtaaatgtatttgatattaatattgataatgaggaggatgcactggttacaacctgtaactcaatttcatcagtaagctgtattggttggtctgggaaaggttataaacagatttactgcatgacacatgatgaaggattttattggtgggatcttaatcatctggacactgatgaaccagttacacgtttgaacatccaggatgtcagagaagtagttaacatgaaagaagatgctttggactatttgattggtggcctatatcatgaaaagacagacacattgcatgttattggaggaacaaacaaaggaaggattcatttgatgaactgcagcatgtcaggactgacccatgtgactagccttcagggagggcatgctgctacagtccgttctttctgttggaatgtgcaagatgattctttgttgactggaggagaagatgcacagttgttactttggaaacctggagctatagagaagacctttacaaagaaagagagtatgaaaatagcatcctctgtgcaccaacgagtacgagttcatagtaatgattcttataaaagaaggaaaaagcagtgataatgcatttggcactttgtttggtaggttttatagtttcaaatagtccttcttgtttactacccatggtagacatgtttaaagctttatgtaaaaacaagccagttagcaaacagtcctggaaaaatatggtgagaatggtttaattccggtcttcacatattctaaaaaattttaaagcctctaagtataaaatcagtgagttgaaagtaaaatttcttatttaaagaacccatctgttaatgtagtaaatgttggctttaaagaaatagctccgataaggactttttagaaggaaatacttggtaaaacttaataaaacaggtggttggctgcattttttaagcccagttttttacattttaaattgtctttattgtgtataaaaccagattagactatattcttcatctgaggagcatctatatgtttaatacacctaatgtattatgctggagtatttaaatgtaagtattttaatgagtaaatagaattaaccttttttacaaatgaaatgataggcatctatgtaaagtgagaaaaatatgtttcgtaaatatttgcatctttaatattgttagtaagtagtaaacaggtgttttgctgattgaaaggaagttatcttggtaaattgagactcaaagtgaaatacaaaaatgaaaatatttataataggactcgacttggagaaattgctattcttcctgttgtccaaaccataaatctgaggataacctgggcttttctctttcctcttctcctaaccagtttttcaccaagtcctgtgccatttcacctcctaacgtctgtcagctatccttttgcctttacctcaccactattaccctagagaagactttcattatttctcatctggattaccagctcgatctctaatctgcttcagttcatccttcttgctacttctaggctaaacatcaaaaacagatctggtaggggcggggaaatgagggggaagaaacaaaaacgtgatggtgcctcatgctgcttaaaatcttcagtacattgatgttttgatggcggactacataagcgttaaaaattgtgtttttcagaatctttaaaatataagacagtgctatctagtgaataaaaaaattagtttgaaagatatctggagaaatcgcattcataaaacaattggaagtgaaactattaaaacaatagggctttttaaaattaaaaatatttaaaattcaaaagtaattaatagtgttggaagatgtaggtgagaaaatattcctgaaagtagaactgaaagagacaaagagaaaagatgaaagccacagaagataaatacaggggtcaaaaccagactaacagttttagaaagtgaaaaaagttaaaaaagaaatgggggcagtgggttattagaaataacataaatggctggtatggtttgtctgtgtcctcacccaaatttcatctcgaattgtaatccccataatccccatgtgtctagggagagacctggtgggaggtgattggatcatgggggtggtttcccctacgatgttctcctgatagtgggtgagttctcacaagatctgatggttttataaagggctctgcccctttaactcctcactctttctcctgaagccttgtgaagaaggtgctttgcttcccctttgcgttcccccatgattgtaagtttcttgaggcctccctggccatgctgaactcttcagtcaattaaacactttcctttataaattaaaaaaaaaaaaaaa

SEQ ID NO: 1430 - protein, 387 aa, Homo sapien
MEKIEEQFANLHIVKCSLGTKEPTYLLGIDTSKTVQAGKENLVAVLCSNGSIRIYDKERLNVLREFSGYPGLLNGVRFANSCDSVYSACTDGTVKCWDARVAREKPVQLFKGYPSNIFISFDINCNDHIICAGTEKVDDDALLVFWDARMNSQNLSTTKDSLGAYSETHSDDVTQVRFHPSNPNMVVSGSSDGLVNVFDINIDNEEDALVTTCNSISSVSCIGWSGKGYKQIYCMTHDEGFYWWDLNHLDTDEPVTRLNIQDVREVVNMKEDALDYLIGGLYHEKTDTLHVIGGTNKGRIHLMNCSMSGLTHVTSLQGGHAATVRSFCWNVQDDSLLTGGEDAQLLLWKPGAIEKTFTKKESMKIASSVHQRVRVHSNDSYKRRKKQ

SEQ ID NO: 1431 - DNA, 3440 bp, Homo sapien
  Unsure 2395-2530: Unknown base
gaaaaatgaaacgtctttgtggtccggggctgagacccacgaggagactgggcgggatttctggcgttaggaggcggggcctttcggctttgggcgcgagtggttaaaagacagttggtgtcggttcggcttctcgggtcggattccgcggtcccaacccttccccatggccgaccctgaggagttgcaggtttcttcgccgcccccgccgcctccctcttctccctcctcttcagacgcctctgcagcatcttccccgggcggcccagtgagtttgggctggccagttccgagcaggagcagcggcccaacggtggaccagctggaggaagtggagctgcagatcggagacgcagccttttcattaaccaaacttcttgaagccacatctgcagtatcagctcaagtggaagaacttgccttcaaatgtacagaaaatgcacgtttccttaaaacgtggcgggacctcttgaaagaaggctatgattctttgaaacctgatgactgatttggcatacttcgttgtttaataatgactgcaataattcatacttcttatgtcatattttgtacatgtaccacacatataggatgacctctgtccagcagttctgtatatactcagaatgaaatttttcttggttttcttggtttttgtgaaagcagaataccgatgctatttttgttgcggaccagtacttgtttgtccttaaatactttatgcctctgaactttcatagaatcctttatgaaagttaacttcatcaatagacggttaatattaatagagccacagtgctaccagtagcaaactaggtagaccattatttgttttgcaacaagatgctaagcatggcagactttgaagttgcgtttcatcttaaggaccaagggaggtaactttaaggttgccagtggtggatccagctccgttaggctaagttgtctacagctaatgattgtgtctttattctatatccccagcacctaaaacagggtcacacaacattcactaaatgtttgttgaataaaagagttaacaaacataattgaaagctttttttcttcctatatttagcatgaagactgtcattgtttctctaggaaatgtatgaatctgaacttttttgacttgaagaaaaacattctttttttacagagatttggactttgatgataggttttaaaaatatatgataaatattttttgtacttgtttgattttttttttaaagactttacttcagaaagggaaagactgtttagaaagaatgcatattttttccctatttatttctgtggttactgcttttgcagtttaacagtgtttgtatttgatatttgtatatgtttgattgctatctttaaagtgccttatcagatttatggctctgtgctattactttttgagctttgcaagttgtgtacataataattctaaagaagttactttgtttgcaatgcatcaaatttaaatgatgtgattttttttgtattatttgatcttagtgacagtgttctattttgcatcctgtatcttatgttgcttttggtgttttgtgttgtgtgtcaacgattaagccaactaattctctaccatatataacttctggacatttttgatacaacatcttaattctttgtagatatggagataggtacagaactatattctaatgccccacaatggggctatgagaggggacagatggatgggcaaagaatagttttgtttaacatattaggtcatagttcttgattagtttttttagttaaagataaacacatagggtgtgatttctataccaaagatatgcttatttcagtattagaaaaatattcttcttacatctcctgaaaattgcaatttttaaaatgtgtaaaaataaattattattaaaagcacattttatttccatttgtttggattcattaccttaaaactttattgacatatttcaaagatataggaaaggtaaatgatttcaagaaaatccgtgtatttctaccatgcagatgtaataaatgttagcatttggctatattttcttcagacacacatatgcatgtaattgcaaatgttagatacatttgaagtttgctttgttacctgtttgatcctgtcccgttcctccctccccagagtccccagaggtaaccactagagggggcataatatagcatgtgtttttatatttttaatacaaatatattttttaaaagcgctacaaaatattgttttatatatgtggtagccagcttccagatggccccagtgatccctggcctcctggtgttcatgccccagtatagccttctcctgcattttacagtgctgacttttgtaactaccaggatattgagcaaatgcagtgtgtgatttctgaggccatannnnnnnnnnnnnnnnnnnnnnnnnnnnnnnnnnnnnnnnnnnnnnnnnnnnnnnnnnnnnnnnnnnnnnnnnnnnnnnnnnnnnnnnnnnnnnnnnnnnnnnnnnnnnnnnnnnnnnnnnnnnnnnnnnnnnnnnaagcactgggattacaggcatttttgctcatttttctatgttgttttttttacttgtcagtttttagatattacatattttgaatactaatgatctgttatgtatgttccaattatcttttttagtctggtttgtcttcatattttggttatgaaatcttgaatttttaaaaacgtaattttaccaatctttcataatgatttgctttttctggtttttgtataggaaatgtcataaaaatagtcctattcagccttccaaaagttacaaaatttttggttttaacatttagatgtttagtccaactgaaattgttttcttttatggcatgattttggaatcttgttttaattatttttacatatttatagctgttcctccaagtatcaatttttcaagtgcaacatctgtcatgcagttactatgtaagggccagattctgacctttctgttctttttatctgaaggaaatttgaacatgccacccccaaatatgccgatttggcatactgattatttcgagctaaaggtgcttgactaacagtagttgcagaaatggctattttaactgtcctttcctacctgtagcaagccatacaaacttctttgataaagatgctttcctgataccaagatgagaagatggctctaatcagctgagacagcaccagaggaatctacaaacaagaaactattagtttcttaacatatatttaccttccacagtttctgcctctggaagcctaaaactgctttccttcgtcttgtcacacttctctgaaatgtattctttgtggaagatgctatatagtccagagttgtaagccactacttgtgtttaccttttcattgagttttctcctgtgtgatgtacgttgcatatattaataaaattacttgtttttctctt

SEQ ID NO: 1432 - protein, 34 aa, Homo sapien
KMKRLCGPGLRPTRRLGGISGVRRRGLSALGASG

SEQ ID NO: 1433 - DNA, 1590 bp, Homo sapien
gtaaagcattgcttgaggttgcccaggtagtttcgccttacacttcttgtcccagtgcaattattagtagagctccctttcactgtcaaatttccggttggggataaattgcattgtcgttttggtttgagataggaagatgaggggaggaaggaggtgaggcggtaaggggcgttctctctcttgggtcccgcgcccaacttccgctggcccaaagaaactataattttgaaccaacagacctctgctggcatctgcgattgcatttttcctgttttaacaacggctgtgctagacgaagtggtgaagcccaaagacttatttttgagctcgctgtaagactgagaaatcacgtagtccttcctgaaaccactaagaggaaaaatgtctgtgacactgcatacagatgtaggtgatattaaaattgaagtcttctgtgagaggacacccaaaacatgtgagatggagtctcgctgtgtcccccaggctggagtacaatggcgcgatctaggctcactgcaacctccgcctcctgggttcaagcaagtcttctgcctcagcctcccgagaactggaagaggaggcaacagtatttggggcaagaagtttgaggatgaatacagtgaatatcttaagcacaatgttagaggtgttgtatctatggctaataatggcccgaacaccaatggatctcagttcttcatcacctatggcaaacagccacatttggacatgaaatacaccgtatttggaaaggtaatagatggtctggaaactctagatgagttggagaagttgccagtaaatgagaagacataccgacctcttaatgatgtacacattaaggacataactattcatgccaacccatttgctcagtagctatgatagacctggacaaataacttgacaaattgctggaacacacttattgtggtttacccggttttaattatgagccagcttgacgtggttgtggccgttgggcgagatgaagctacactgtgaggtggaggtgatcagccggcacttgcccgccttggggcttaggaaccggggcaagggcgtccgagccgtgttgagcctctgtcagcagacttccaggagtcagccgccggtccgagccttcctgctcatctccaccctgaaggacaagcgcgggacccgctatgaggattccatatggctctcatatcattccattccatctctgccaagatttggataccgcaaaaatttgtgtttgtggaagattctgtctgaactctttcattcaaggaactactaccatgaatctgcattctgttgcccacactgtggtcttagtagataatttgggtggtactgaagcacctattatctcttatttctgttctctaggctgttatgttaattcctctgatatgttaaagtaatgggtgagaccagaaaaagaaatttcaataacagatcagtttggggtgcatgtatgattttgcagcgtcaaattggagtaagggaagatttctgtatacttgctggagaggaggaatgtgtatagttactcatttagatgactccaaaacttttattaaaaccaattttagtttt

SEQ ID NO: 1434 - protein, 165 aa, Homo sapien
MSVTLHTDVGDIKIEVFCERTPKTCEMESRCVPQAGVQWRDLGSLQPPPPGFKQVFCLSLPRTGRGGNSIWGKKFEDEYSEYLKHNVRGVVSMANNGPNTNGSQFFITYGKQPHLDMKYTVFGKVIDGLETLDELEKLPVNEKTYRPLNDVHIKDITIHANPFAQ

SEQ ID NO: 1435 - DNA, 7874 bp, Homo sapien
  Unsure 723-862: Unknown base
cttggctctctgtgcctcagtttctcatctgtaaggtggggatagatgatggcaatacctgcttcagagagtgaaaattagatgagatgatgtctgtaaaattacgtaagacggtacccaaaagtagtactatttttcccttttcttattagagcaggttgggcacgttttgatgtccgtgggaatgagcaggtagagagggtggtattgaggctggaggggagagaagggacccacagatggggagagaagtcttgggtgcctgttttatcccaaaccaggggaaggagggaacaggtagggctggctgcaggaaagcttgcaggtatggggtacacagttaaaagggagtgtcttctgatagtcttgatgcaggcctggaggtcgtttgttatgggggtggaggtcctgatgtacattgtggcggtaagatgccgtgctgtctttgccaccagcctgtggcagccctggtgttacaccagggcaggtgggcagtttaatgtatctcaggccagatgacctgccctgcccacctgttgaggctccagtagatagacgtgaaagcacagtataagcataatgcaccactttaatccttttctctgaggagctggaaggcctgtagtcaccatctgagccaaatgtcattcaagtacttcacttgggttacacaccacactttgacccactatctcatttagtcatcacaacaaatgggtgaannnnnnnnnnnnnnnnnnnnnnnnnnnnnnnnnnnnnnnnnnnnnnnnnnnnnnnnnnnnnnnnnnnnnnnnnnnnnnnnnnnnnnnnnnnnnnnnnnnnnnnnnnnnnnnnnnnnnnnnnnnnnnnnnnnnnnnnnnnnaaccactgtgaaagtttgaaaactctgtagcagccaagcaggatggaaagatgtgtagggattgtcttctccatttgatagatgagacaagagctgggtactctgatctccatcccaagcacacagagcttggggccccacaggcctggtgtgaatcccactccactaccagaggctgtgtgcctttggaccaggcatcttgcttctctgaccctatatacagctgcagaagaattccttgcaggttgctgtaaggatttggagggaaactgttgcccagcacacagtacacattctgggagccatcgtttccccagtgcacttttcctgcaaatgtggatctacatcccacttggatgctgagaccagctgctgtgatcttgcatttgtttagcgctttgttctccttgaggcagtaaagtggtggcacctgaccggagcatgtagccacctatgacttcctgagtggggtggtgtggggagggccctgaggagtctgtggtcctaggccttggatttcatcagggctttcctgctccttctggttgcctcagtcccaggcaagatagggtcccagaatcttacagcccagaggccacctgttgcaacttcttttttacagatggagtcatcagaacccactgtgaggaagtgacttctccttgaggtcacccagacactccaaacagagcagagcaaaagcgcctagaacttgaaattttggacctgtctccaacaccctggggatttccaccaggaagccttcagtcaccatccaggggatttttatcgccacaaagggtaattcctgctccatccctgctgtgactcagctgtgacgttgaaccacacaagccagagagaagaagataaagtcatcagagctcctactcaccagagagtgaggcccaggccaggactccacaaggctggtcccctgccctggagcaacttaaacaggccctctggccagcctggaaccctgagatggcctccagctcaggcagcagtcctcgcccggcccctgatgagaatgagtttccctttgggtgccctcccaccgtctgccaggacccaaaggagcccagggctctctgctgtgcaggctgtctctctgagaacccgaggaatggcgaggatcagatctgccccaaatgcagaggggaagacctccagtctataagcccaggaagccgtcttcgaactcaggagaaggctcaccccgaggtggctgaggctggaattgggtgcccctttgcaggtgtcggctgctccttcaagggaagcccacagtctgtgcaagagcatgaggtcacctcccagacctcccacctaaacctgctgttggggttcatgaaacagtggaaggcccggctgggctgtggcctggagtctgggcccatggccctggagcagaacctgtcagacctgcagctgcaggcagccgtggaagtggcgggggacctggaggtcgattgctaccgggcaccctgctccgagagccaggaggagctggccctgcagcacttcatgaaggagaagcttctggctgagctggaggggaagctgcgtgtgtttgagaacattgttgctgtcctcaacaaggaggtggaggcctcccacctggccctggccacctctatccaccagagccagctggaccgtgagcgcatcctgagcttggagcagagggtggtggagcttcagcagaccctggcccagaaagaccaggccctgggcaagctggagcagagcttgcgcctcatggaggaggcctccttcgatggcactttcctgtggaagatcaccaatgtcaccaggcggtgccatgagtcggcctgtggcaggaccgtcagcctcttctccccagccttctacactgccaagtatggctacaagttgtgcctgcggctgtacctgaatggagatggcactggaaagagaacccatctgtcgctcttcatcgtgatcatgagaggggagtatgatgcgctgctgccgtggcctttccggaacaaggtcaccttcatgctgctggaccagaacaaccgtgagcacgccattgacgccttccggcctgacctaagctcagcgtccttccagaggccccagagtgaaaccaacgtggccagtggatgcccactcttcttccccctcagcaaactgcagtcacccaagcacgcctacgtgaaggacgacacaatgttcctcaagtgcattgtggagaccagcacttagggtgggcggggctcctgagggagctccaactcagaagggagctagccagaggactgtgatgccctgcccttggcacccaagacctcagggcacaaagatgggtgaaggctggcatgatccaagcaagactgaggggtcgacttcgggctggccatctggttaggatggcaggacgtgggctgggcccacaaaggcaaagggtccagaaggagacaggcagagctgctcccctctgcacggaccatgcgacactgggaggccagtgagccactccggccccgaatgttgaggtggactctcaccaaatgagaagaaaatggaaccaggcttggaaccgtaggacccaagcagagaagctctcgggctaggaagatctctgcagggccgccagggagacctggacacaggcctgctctctttttctccagggtcagaaacaggaccgggtggaagggatggggtgccagtttgaatgcagtctgtccaggctcgtcattggaggtgaacaagcaaacccagacggctccactaggacttcaaattgggggttggatttgaagacttttaagtttccttccagcccagaaagtctctcattctaggcctcctggcccaggtgagtcctagagctacaggggttctggaaacattcaggagcttcctgtcctcccagctcctcactcaccttcagtaacccccactggactgacctggtccacagggcacctgccaccctgggcctggcagctcagcttccccaacacgcaggagcacacccagcccccacatcctgtgcctccatcagctaaacaccacgtcacttcatgcaggtgaaacccagtcactgtgagctcccaggtgcagccagaggcacctcaagaagaagaggggcataaactttcctcttcctgcctagaggccccacctttggtgctttccagaatcccgtaacacctgattaactgaggcatccacttctttcagcagactgatcaggacctccaagccactgagcaatgtataaccccaaagaaataatttttagaatctctttcgaagttttcctaaagtgtatggtttgggagttgtttgtactgagccaggtttgaaaaggccattgctgagtttgaggtggtgccaccagttttgcaggtggcatcagaggctggcatgctggcaggaacatcccctcttagccccagtcttctcttttctataatgagacccaccccagcttgcctccctccctggcttctctgaccctcaaaggagatgccacgcaggacagactggagagagaagcctgggcaatactgcccgcctgtcatggcctggtggtggcccacacctatcttctcaccttggaggccacacccaactttccaaagaccctgagacaagtcaggaccctactactctcccctgctgctttcctgacagcttactcttcctccacctgctgagcctgtgccagactccattgctcaaatcgttagggttgcttctataaaaatgggtcagtagcccttcctgttctctccagcccagcatacaggaggatcaaaggaggtgacggagcatcgtggcacggcagtctcaatgggtcagaaacccaggccagctgggctctaagcctggcatcctgtcatgcttagtccttcagctgaagatcagaggaagcctctcccttgccctctccagctctaggggttttcaggaggcccaactgcaataatggagcactagtgcttttatgtgcaatggtgtcgtccatgcacgacagcagcaaacattctggggctgctttttattgttcccacggctgacagcgtggcagcggagactgtggaggcagtggagactgacttcttcctgctgacagctggatgtcacacatgaaggtctggcctagcgagtgatgggtctaggccctgaaactgatgtcctagcaataacctcttgatccctactcaccgagtgttgagcccaaggggggatttgtagaacaagcccccatgagaaacagctgttactctacacttttgattgcctatttctgatggcaagagatacatactctcttcaaagagcatgagatgcagccattctttcagcaaagcttcattgacacctgcacctgttaactgtgttcgacattgaagggagaaaggcaagatgtgcactctggactcaagaaactcttagttcagtggaggaaatgagcagataagtagatcattatgattgagagtaggagaagcttagagaaagcacagaaccccagatccagctggtgaaggagggaaggcttcaggcctttaagctcagcctgagaatattgtgaaatgcagaggatggggaaaagggaagagtaccgacttgaaaacggagagctgtcttggctgagggcagggtctgtgtggcaggatgggggagggagtcagaagggtcagatgaactggagtgtagacagcatcagatgcagcagtgcccaccgccccccccccaaccccccgccctgcccacagagcacctgctggtaaccctgggcctattgaaagcaggatgagatgataatttaagacactgaatgatttcttttccaacaaagctctatgttaagtgcatcaaagatgtgacattgcatcttttacaggtgattcaagggtgggggaggcaagatgcaggcaaagccaccgtttcactgggtggattcagtaggtcccccacccccagcagttcccgaaggtgctggggagatttttaaaacaccagtgacagaatctcacccccgtaagtgataaagcctgagcatcaggatgaagtctcctgcaggggaaggttctgatgccccagtcaagtctgactggccgttgggggcgaaaggtgtgactgaagcactgacaaggtgggtggaggcactaacctgtaacacctcctctggcttggaaagttttgcttcatcaactacagctggaacctccgggggcaaggcagaagggccagaacagggaggtcttctactgaggggctgtcatcgatgtcctgagacatttgtggagcttctggtatacacagtgcagacagtttcccctgagaagctgattgtctaaaagtgacacaaaccctcttcctgccacgtgcccccgaaaagcccatcagaaacctgaatggcttcccgttgccaactgaagcatcctcaccctgtacattagaaccccctgcggagacttcatcctgatgctcaggctttatcacttaacagcccctgaagtgcacttagaataccaggtgctgccggctcctgggtctggccataaggtgcgctccttacttggtttctctgactcctaatccaaatgagccaagggtctgaggggctgcacaggcagtaggtgtggagcacagctctgagcccaagcctgggcctccaagctgcgctgctgctgtagggcctgatctcccacctatcccttccctgcaggtcaccttcatgctgctggaccagaacaaccgtgagcacgccattgacgccttccggcctgacctaagctcagcgtccttccagaggccccagagtgaaaccaacgtggccagtggatgcccactcttcttccccctcagcaaactgcagtcacccaagcacgcctacgtgaaggacgacacaatgttcctcaagtgcattgtggagaccagcacttagggtgggcggggctcctgagggagctccaactcagaagggagctagccagaggactgtgatgccctgcccttggcacccaagacctcagggcacaaagatgggtgaaggctggcatgatccaagcaagactgaggggtcgacttcgggctggccatctggttaggatggcaggacgtgggctgggcccacaaaggcaaagggtccagaaggagacaggcagagctgctcccctctgcacggaccatgcgacactgggaggccagtgagccactccggccccgaatgttgaggtggactctcaccaaatgagaagaaaatggaaccaggcttggaaccgtaggacccaagcagagaagctctcgggctaggaagatctctgcagggccgccagggagacctggacacaggcctgctctctttttctccagggtcagaaacaggaccgggtggaagggatggggtgccagtttgaatgcagtctgtccaggctcgtcattggaggtgaacaagcaaacccagagggctccactaggacttcaaattgggggttggatttgaagacttttaagtttccttccagcccagaaagtctctcattctaggcctcctggcccaggtgagtcctagagctacaggggttctggaaacattcaggagcttcctgtcctcccagctcctcactcaccttcagtaacccccactggactgacctggtccacagggcacctgccaccctgggcctggcagctcagcttccccaacacgcaggagcacacccagcccccacatcctgtgcctccatcagctaaacaccacgtcacttcatgcaggtgaaacccagtcactgtgagctcccaggtgcagccagaggcacctcaagaagaagaggggcataaactttcctcttcctgcctagaggccccacctttggtgctttccagaatcccgtaacacctgattaactgaggcatccacttctttcagcagactgatcaggacctccaagccactgagcaatgtataaccccaaagaaataatttttagaatctctttcgaagttttcctaaaaa

SEQ ID NO: 1436 - protein, 416 aa, Homo sapien; identical to SEQ ID NO: 461

SEQ ID NO: 1437 - DNA, 1311 bp, Homo sapien
gggggcgcggccggttactcgcttaccggaggcttcagtccccggcggcgcggcgacagctagggttcacggccactggggcagaggagccgcgagaagatgtgggtttttggttacgggtccctgatctggaaggtggatttcccctatcaggacaagctggtcggatacatcaccaactacagcaggcgcttctggcagggcagcacggaccaccgcggggtccccggcaagcctggaagagttgtgactcttgttgaagatcctgcgggatgtgtatggggtgttgcttacagattgccagtaggaaaggaagaagaagtaaaagcataccttgacttcagagaaaaaggaggctacagaaccacaacagtcattttttatccaaaagatcccacaacaaaaccattcagtgtattgctatatattggaacatgtgataatcctgattatcttggtcctgcacctctggaagacattgctgaacaaatttttaatgcagctggtccaagtggaagaaatacagaatatctttttgaacttgcaaattctattaggaaccttgtgccagaagaagcagatgagcatcttttcgctttggaaaaattagtaaaggaacgtttagaagggaaacagaacctcaattgcatataatttagtcttcagagaattaacttcagtgcacaatgacaatatgatttggaaatacgtttacttaaagatcttatttttaatgtagtgaggatattatttaaacttttattttaactggaaatgtcctgaaacacatatttaaaatattgggatacagtgaaagaaaaattcaaattttaataacataaagatttcctaactttatgttattgaacacttactcactagaagtgagttctttagaaaaatacagtgaaggactcagttcagtcttgtttttatcagagtgataatcatcctgtttcacatcccaatactattttgaaattctaaacaattaaaccaaaattccaataaatataaggttatgccttcaatatattcctatacaattctgtaaccatggtttaaaatacacaagcttaaaataacatgcttagaaatacacaataatatgaacagtatttcagccttaattgtgaatttccttgttattcaagtattaaatgaaatcttttgagtttttagccaaaaattggcatttttaaaatacgaaaatttccttggaattataatgtactgtacctcttcttttttaaataaaggcattttactatatggaaaactaaaaaaaaaaaaaaaaaaaaaaaaaaaaaa

SEQ ID NO: 1438 - protein, 184 aa, Homo sapien
MWVFGYGSLIWKVDFPYQDKLVGYITNYSRRFWQGSTDHRGVPGKPGRVVTLVEDPAGCVWGVAYRLPVGKEEEVKAYLDFREKGGYRTTTVIFYPKDPTTKPFSVLLYIGTCDNPDYLGPAPLEDIAEQIFNAAGPSGRNTEYLFELANSIRNLVPEEADEHLFALEKLVKERLEGKQNLNCI

SEQ ID NO: 1439 - DNA, 2320 bp, Homo sapien
gctcagtgggggcggctactgctcatgtgattgtggagtagacagttggaagaagtacccagtccatttggagagttaaaactgtgcctaacagaggtgtcctctgacttttcttctgcaagctccatgttttcacatcttccctttgactgtgtcctgctgctgctgctgctactacttacaaggtcctcagaagtggaatacagagcggaggtcggtcagaatgcctatctgccctgcttctacaccccagccgccccagggaacctcgtgcccgtctgctggggcaaaggagcctgtcctgtgtttgaatgtggcaacgtggtgctcaggactgatgaaagggatgtgaattattggacatccagatactggctaaatggggatttccgcaaaggagatgtgtccctgaccatagagaatgtgattctagcagacagtgggatctactgctgccggatccaaatcccaggcataatgaatgatgaaaaatttaacctgaagttggtcatcaaaccagccaaggtcacccctgcaccgactctgcagagagacttcactgcagcctttccaaggatgcttaccaccaggggacatggcccagcagagacacagacactggggagcctccctgatataaatctaacacaaatatccacattggccaatgagttacgggactctagattggccaatgacttacgggactctggagcaaccatcagaataggcatctacatcggagcagggatctgtgctgggctggctctggctcttatcttcggcgctttaattttcaaatggtattctcatagcaaagagaagatacagaatttaagcctcatctctttggccaacctccctccctcaggattggcaaatgcagtagcagagggaattcgctcagaagaaaacatctataccattgaagagaacgtatatgaagtggaggagcccaatgagtattattgctatgtcagcagcaggcagcaaccctcacaacctttgggttgtcgctttgcaatgccatagatccaaccaccttatttttgagcttggtgttttgtctttttcagaaactatgagctgtgtcacctgactggttttggaggttctgtccactgctatggagcagagttttcccattttcagaagataatgactcacatgggaattgaactgggacctgcactgaacttaaacaggcatgtcattgcctctgtatttaagccaacagagttacccaacccagagactgttaatcatggatgttagagctcaaacgggcttttatatacactaggaattcttgacgtggggtctctggagctccaggaaattcgggcacatcatatgtccatgaaacttcagataaactagggaaaactgggtgctgaggtgaaagcataacttttttggcacagaaagtctaaaggggccactgattttcaaagagatctgtgatccctttttgttttttgtttttgagatggagtcttgctctgttgcccaggctggagtgcaatggcacaatctcggctcactgcaagctccgcctcctgggttcaagcgattctcctgcctcagcctcctgagtggctgggattacaggcatgcaccaccatgcccagctaatttgttgtatttttagtagagacagggtttcaccatgttggccagtgtggtctcaaactcctgacctcatgatttgcctgcctcggcctcccaaagcactgggattacaggcgtgagccaccacatccagccagtgatccttaaaagattaagagatgactggactaggtctaccttgatcttgaagattcccttggaatgttgagatttaggcttatttgagcactacctgcccaactgtcagtgccagtgcatagcccttcttttgtctcccttatgaagactgccctgcagggctgagatgtggcaggagctcccagggaaaaaggaagtgcatttgattggtgtgtattggccaagttttgcttgttgtgtgcttgaaagaaaatatctctgaccaacttctgtattcgtggaccaaactgaagctatatttttcacagaagaagaagcagtgacggggacacaaattctgttgcctggtggaaagaaggcaaaggccttcagcaatctatattaccagcgctggatcctttgacagagagtggtccctaaacttaaatttcaagacggtataggcttgatctgtcttgcttattgttgccccctgcgcctagcacaattttgacacacaattggaacttactaaaaatttttttttactgttaaaaaaaaaaaaaaaaaa

SEQ ID NO: 1440 - protein, 301 aa, Homo sapien
MFSHLPFDCVLLLLLLLLTRSSEVEYRAEVGQNAYLPCFYTPAAPGNLVPVCWGKGACPVFECGNVVLRTDERDVNYWTSRYWLNGDFRKGDVSLTIENVILADSGIYCCRIQIPGIMNDEKFNLKLVIKPAKVTPAPTLQRDFTAAFPRMLTTRGHGPAETQTLGSLPDINLTQISTLANELRDSRLANDLRDSGATIRIGIYIGAGICAGLALALIFGALIFKWYSHSKEKIQNLSLISLANLPPSGLANAVAEGIRSEENIYTIEENVYEVEEPNEYYCYVSSRQQPSQPLGCRFAMP

SEQ ID NO: 1441 - DNA, 798 bp, Homo sapien
tcgacccacgcgtccgacttcggaaactgaataaggtgattagtgacctgactccagtcagtgagcttcccttaacagcccgaccaaggtcaaggaaggaaaaaaataagctggcttccagagcttgtcggttaaagaagaaagcccagtatgaagctaataaagtgaaattatggggcctcaacacagaatatgataatttattgtttgtaatcaactccatcaagcaagagattgtaaaccgggtacagaatccaagagatgagagaggacccaacatggggcagaagcttgaaatcctcattaaagatactctcggatttgtcctacagcttagtattgtggttgacagcgatactagggctgacagcacagaagtcacaagagaagagtggaagggcaagaattcaaagcatttgttcatacaatgtggcaacctcttttgcatagttgcgtaggatcctgtttgtaatgctatcataaatattctgtagttttttttttttctctcccaactggagctatgacactttttattggattcagtcttgtctcttgtctagaaagaactttatcttgttgacgcatgagctgtttaaaaattatcctattaaatgttggttaatagttgtgcagtttttcatttcagatggaaaggcaatgcaaattttgcctttgttttctgtcaccttccaacccctgagcacttctagtcagatacagattcatcagtgtatgcaacatcctttgtaatttaaaataaaaaaagatgaaaaaaaaaaaaaaaaaagggcggcc

SEQ ID NO: 1442 - protein, 62 aa, Homo sapien
MREDPTWGRSLKSSLKILSDLSYSLVLWLTAILGLTAQKSQEKSGRARIQSICSYNVATSFA

SEQ ID NO: 1443 - DNA, 1250 bp, Homo sapien
  Unsure 953-994: Unknown base
aaattttttttctactagctactgaggctgccacatctggatggaactgagtggagggggaaaagaatgaaaaactcaaaagaattcccatgagggtgtcttgctttctctcctgagttacaatactttagcaaaatcatgaggctttagagatatggtgtagtctgcaaacttcttaatgcccttacccacatttaccatgtttcctggccttcctctgtgtcaactcttagctcttcctaatcattatttaatacatgagtgagtttagtagtgatcatatttctcaggtcctttagaagctggaattttaaaagaattagaaggaggagtatgtgaattctttggagctcactgcctgacttgcttatgaccaggaaaatctatcccctgtatctaattttaatttcatggttaaatttgagaattgtggaaaccaagttccacaaggctattctcatatttctcccaatttctttttcagccaactccaaggatatgtatcacctttgacttaatttgctttctctaagggaaaggggaaaaaatgttcacatagctccactgcaatgttttttataatagaggagagatattgtaaatagagactgccagccagtttccacaaaaaaacgaagagttcataaatttgacatgtttgaacccataaagcattttctttgcttggaaccattataaaagtaagtgagttttcaggctctatatacattttaattcctcacgttttatattggagagttcggtacagactgtccattactgcaccaaaagaatgagtgaactgttacctatagggaaagaacacttcttcttcctgctgtttgggaaccatctcagtgtggcgtaatggttaggagtacagattccagatcctgtttcttagatttaaatcttgactctgccacatactagctgtctgactgaaccttggnnnnnnnnnnnnnnnnnnnnnnnnnnnnnnnnnnnnnnnnnncagtacttacctcatagagctgttgtgaaaagtgatgactgaatatgtaaaagcaccctagaaacagtgcctggcacatgctaagtgctttgttcattattgttgttattatgtaattttctctcagactgagagcactgttagtgacccaagtaaatttatagtttttaagtacagaggaaaaataaagcctattttttgttaacagtcttaataaataataaaatggaataaagaaaccaagaccccaaaaaaa

SEQ ID NO: 1444 - protein, 47 aa, Homo sapien
MTRKIYPLYLILISWLNLRIVETKFHKAILIFLPISFSANSKDMYHL

SEQ ID NO: 1445 - DNA, 2408 bp, Homo sapien
  Unsure 473-507: Unknown base
  Unsure 768-1062: Unknown base
  Unsure 2175-2286: Unknown base
gttcttcctttccttgtctctcagcaaaatataatcatcttagaaattttcctctcttctattgtctattctatccacatatctagcttatttcctgttactgggatttgcctatgtttttctataccttacttctgtaaaattggtgagtttttctatttatccctctttctccttagttaatgaggtaccctaaagcactagcacttaggaattagtctacttgtcagcaagagcgatctattaacaaagggatatgtaagaaacaggagaactaaaacaatcttgtggaaagggattattttctaagcgtgtgtctactatattagtttacttccgaaaaacatcagttacttctcataaatccatcctgtgtttaagaacataaaatatagtgtggataacaaatgcaaagcatgcaaattttcaggtaatcaggcgagccattacttacggcacaggtgtgccgccannnnnnnnnnnnnnnnnnnnnnnnnnnnnnnnnnnctactcaataaatagagagcataggtgaaagaaggacctaatacagaaatttttaacttttcctgatactgtttcaactttcttttgaatgtctgatttaggctgccctagtcatccttggacgttatccttgggtgattcaattagtagcaaattgagttgattttcaacttctccattaatgtgcaggacctgaaatcaaagcaaaagtgtgctgttgagggaaatgttttgtcacctaggagataagtcaagctgtgnnnnnnnnnnnnnnnnnnnnnnnnnnnnnnnnnnnnnnnnnnnnnnnnnnnnnnnnnnnnnnnnnnnnnnnnnnnnnnnnnnnnnnnnnnnnnnnnnnnnnnnnnnnnnnnnnnnnnnnnnnnnnnnnnnnnnnnnnnnnnnnnnnnnnnnnnnnnnnnnnnnnnnnnnnnnnnnnnnnnnnnnnnnnnnnnnnnnnnnnnnnnnnnnnnnnnnnnnnnnnnnnnnnnnnnnnnnnnnnnnnnnnnnnnnnnnnnnnnnnnnnnnnnnnnnnnnnnnnnnnnnnnnnnnnnnnnnacagtagccctcattaatgggaataaagtatcatctgagagtcatcccaaagcttactccctcgttgagccgatgggctgactgagactctggaacccacgggtcactggggtgtgttagtgctcactgaggagacagagctgttgcaatactgagttcaagcagcacgactgactcacataatgtgaagtgaaaccagacagagctccgaacttggtaccttgggtagcaaaggcggcttccaatgatgattctataccggtgaacaaagaaaaatttgctttgagaagctgagaaaatcgagctagacggcagtgaagtaaaggcttctcttgcaaaatctgagtgccgatctgtgatgggaaaaataacttccagataaagcaaaagttgatgtggacaccagtacccagtaaattactgtgaaaaaaaggcaacttctcttggtccagtttacctttagataaatgttttaagggtaaaaatatgtgtatttcaagatatgtcttatgtaaacttttttaagttatgaaaatcatccatattgaaaaatagaatgttttctattttgaaactgttttgcattgtcagttacttaagcagcctattttacattttggtttttgagaacataatagggacctgtatactccttgtggggccgctattttaagactcctgacagctcatcctgcaaaattaaaatccaaaatctaagtcgcaaaattctcttttctccttcctcagttatttacttagagtgtagaacagacatcctcttagagttttttgtaactatcagttatcattaacatcatatttttattctaaatccttccatagaaacactgcttgtggaaaaaaaaaaggcttttacttggtttcaccattgtacagagggtaaatgaaataactttcgctgaatattgggtctataatactgttacatttcctctattattttaacatctttgtgaaaaattcaaatttttactggttcattcacatatcattttaaattggaggtttagttcacatacgatgaatgcacagctcgtaggtatacagtttaacgacttatgacagtggtataaccacaagaccagcaacatnnnnnnnnnnnnnnnnnnnnnnnnnnnnnnnnnnnnnnnnnnnnnnnnnnnnnnnnnnnnnnnnnnnnnnnnnnnnnnnnnnnnnnnnnnnnnnnnnnnnnnnnnnnnnnnnaccaactattatttaacgtcatgtaaatgcaaatatgtagtatacaatcttctgtggctggattttttttcactcaacatttttttgggagattccttcatttggttgcatgtatcagtggt

SEQ ID NO: 1446 - protein, 111 aa, Homo sapien
  unsure 12: unknown amino acid
  unsure 13: unknown amino acid
  unsure 14: unknown amino acid
  unsure 15: unknown amino acid
  unsure 16: unknown amino acid
  unsure 17: unknown amino acid
  unsure 18: unknown amino acid
  unsure 19: unknown amino acid
  unsure 20: unknown amino acid
  unsure 21: unknown amino acid
  unsure 22: unknown amino acid
  unsure 23: unknown amino acid
  unsure 24: unknown amino acid
  unsure 25: unknown amino acid
  unsure 26: unknown amino acid
  unsure 27: unknown amino acid
  unsure 28: unknown amino acid
  unsure 29: unknown amino acid
  unsure 30: unknown amino acid
  unsure 31: unknown amino acid
  unsure 32: unknown amino acid
  unsure 33: unknown amino acid
  unsure 34: unknown amino acid
  unsure 35: unknown amino acid
  unsure 36: unknown amino acid
  unsure 37: unknown amino acid
  unsure 38: unknown amino acid
  unsure 39: unknown amino acid
  unsure 40: unknown amino acid
  unsure 41: unknown amino acid
  unsure 42: unknown amino acid
  unsure 43: unknown amino acid
  unsure 44: unknown amino acid
  unsure 45: unknown amino acid
  unsure 46: unknown amino acid
  unsure 47: unknown amino acid
  unsure 48: unknown amino acid
  unsure 49: unknown amino acid
  unsure 50: unknown amino acid
  unsure 51: unknown amino acid
  unsure 52: unknown amino acid
  unsure 53: unknown amino acid
  unsure 54: unknown amino acid
  unsure 55: unknown amino acid
  unsure 56: unknown amino acid
  unsure 57: unknown amino acid
  unsure 58: unknown amino acid
  unsure 59: unknown amino acid
  unsure 60: unknown amino acid
  unsure 61: unknown amino acid
  unsure 62: unknown amino acid
  unsure 63: unknown amino acid
  unsure 64: unknown amino acid
  unsure 65: unknown amino acid
  unsure 66: unknown amino acid
  unsure 67: unknown amino acid
  unsure 68: unknown amino acid
  unsure 69: unknown amino acid
  unsure 70: unknown amino acid
  unsure 71: unknown amino acid
  unsure 72: unknown amino acid
  unsure 73: unknown amino acid
  unsure 74: unknown amino acid
  unsure 75: unknown amino acid
  unsure 76: unknown amino acid
  unsure 77: unknown amino acid
  unsure 78: unknown amino acid
  unsure 79: unknown amino acid
  unsure 80: unknown amino acid
  unsure 81: unknown amino acid
  unsure 82: unknown amino acid
  unsure 83: unknown amino acid
  unsure 84: unknown amino acid
  unsure 85: unknown amino acid
  unsure 86: unknown amino acid
  unsure 87: unknown amino acid
  unsure 88: unknown amino acid
  unsure 89: unknown amino acid
  unsure 90: unknown amino acid
  unsure 91: unknown amino acid
  unsure 92: unknown amino acid
  unsure 93: unknown amino acid
  unsure 94: unknown amino acid
  unsure 95: unknown amino acid
  unsure 96: unknown amino acid
  unsure 97: unknown amino acid
  unsure 98: unknown amino acid
  unsure 99: unknown amino acid
  unsure 100: unknown amino acid
  unsure 101: unknown amino acid
  unsure 102: unknown amino acid
  unsure 103: unknown amino acid
  unsure 104: unknown amino acid
  unsure 105: unknown amino acid
  unsure 106: unknown amino acid
  unsure 107: unknown amino acid
  unsure 108: unknown amino acid
  unsure 109: unknown amino acid
  unsure 110: unknown amino acid
MFCHLGDKSSCXXXXXXXXXXXXXXXXXXXXXXXXXXXXXXXXXXXXXXXXXXXXXXXXXXXXXXXXXXXXXXXXXXXXXXXXXXXXXXXXXXXXXXXXXXXXXXXXXXXQ

SEQ ID NO: 1447 - DNA, 322 bp, Homo sapien
tcatcagcacagcaatagatctaacgttcccgccaggggtactggtcagcgttggttctttagaaagcctgtgtagaatcgattaaaaattgctcagcacttactacagccattttcaaccaagaaaaaaataattttcgggactcacttatattccacagtttaaatatggacaattaataggtcaaggtccaggctggaaggggaccacttcgaatcttgaatgcaggggcaaacagctcaagacaccatggctgatgaagacgctatgtacacgctttccagtatgaaaaccaatgagctacatggggctggcgaacac

SEQ ID NO: 1448 - protein, 11 aa, Homo sapien
MKTNELHGAGE

SEQ ID NO: 1449 - DNA, 1362 bp, Homo sapien
aaaaccttgaggtgattcatcttccaggctctccttccatcaagtctctcctccctagcgctctgggtccttaatggcagcagccgccgctaccaagatccttctgtgcctcccgcttctgctcctgctgtccggctggtcccgggctgggcgagccgaccctcactctctttgctatgacatcaccgtcatccctaagttcagacctggaccacggtggtgtgcggttcaaggccaggtggatgaaaagacttttcttcactatgactgtggcaacaagacagtcacacctgtcagtcccctggggaagaaactaaatgtcacaacggcctggaaagcacagaacccagtactgagagaggtggtggacatacttacagagcaactgcgtgacattcagctggagaattacacacccaaggaacccctcaccctgcaggccaggatgtcttgtgagcagaaagctgaaggacacagcagtggatcttggcagttcagtttcgatgggcagatcttcctcctctttgactcagagaagagaatgtggacaacggttcatcctggagccagaaagatgaaagaaaagtgggagaatgacaaggttgtggccatgtccttccattacttctcaatgggagactgtataggatggcttgaggacttcttgatgggcatggacagcaccctggagccaagtgcaggagcaccactcgccatgtcctcaggcacaacccaactcagggccacagccaccaccctcatcctttgctgcctcctcatcatcctcccctgcttcatcctccctggcatctgaggagagtcctttagagtgacaggttaaagctgataccaaaaggctcctgtgagcacggtcttgatcaaactcgcccttctgtctggccagctgcccacgacctacggtgtatgtccagtggcctccagcagatcatgatgacatcatggacccaatagctcattcactgccttgattccttttgccaacaattttaccagcagttatacctaacatattatgcaattttctcttggtgctacctgatggaattcctgcacttaaagttctggctgactaaacaagatatatcattttctttcttctctttttgtttggaaaatcaagtacttctttgaatgatgatctctttcttgcaaatgatattgtcagtaaaataatcacgttagacttcagacctctggggattctttccgtgtcctgaaagagaatttttaaattatttaataagaaaaaatttatattaatgattgtttcctttagtaatttattgttctgtactgatatttaaataaagagttctatttcccaaaaaaaaaaaaaaaaaa

SEQ ID NO: 1450 - protein, 246 aa, Homo sapien
MAAAAATKILLCLPLLLLLSGWSRAGRADPHSLCYDITVIPKFRPGPRWCAVQGQVDEKTFLHYDCGNKTVTPVSPLGKKLNVTTAWKAQNPVLREVVDILTEQLRDIQLENYTPKEPLTLQARMSCEQKAEGHSSGSWQFSFDGQIFLLFDSEKRMWTTVHPGARKMKEKWENDKVVAMSFHYFSMGDCIGWLEDFLMGMDSTLEPSAGAPLAMSSGTTQLRATATTLILCCLLIILPCFILPGI

SEQ ID NO: 1451 - DNA, 600 bp, Homo sapien
  Unsure 28: Unknown base
ctggggttggcagtctgcttaacaagangctgggaccacctctgaattagtgaatcagggagctgctgtgtgatcccctcctccaggctttcttggagtttgtctctgccacttcctcaagccctttaaaaaggctcctgtgctttagagagtwaggatgttaatgaccgttcttttttcttgtactttattaagtactagtcttactagactagtgcttaagtggcagtgtctgcctttgccttctcccatctctttatgctcctttcttccaacttctcacgtttctgtttctcgcacggccaggtgtccagcatcccatgctgacttgcggttggccaatcccctcctcgtagatttcctccacattttcctcttcctccttttcctgtgggaagttctttttctgggctgtggctggtcttacgtagttcggtggaaaaagtattgaggtagtgttagatactgtgctgcacctccaggagtgtccaatcttttggcttccctgggccacactggaacaagaagaactgtcttgggccacacgtaaaatacacggacactaacgatagctgatgagctaaaaaaaaaaaaaaaaaa

SEQ ID NO: 1452 - DNA, 1887 bp, Homo sapien
aacaatggatattctgtaaaatatcctgtacaaaacaagactattgccagtaatgtatacaaattgtctttttgtgtacttccagcataggtttggatatatgaacatttttcttttattgttttatcttcacagaaaataaaaggtgttaatttgctttttaaaacaaatttaattatcacattttaaattactttgtggactgtgttttcaaaactttgcaaattcatctgttacacagaaaattttgacttaaaacatctgctgaattccaaatttctgtaatagctactgtatctgtgataaactttcctatatctttccttgccatttctatggattttataatgaaagaaaaaggcattggagactgaaggcagaaatggttgtgacagtgctgtttggctttttcattcttcaaatgccaagtcatccactttgttttcctgtttaggctttgcacaaatacaattgctttcaggaatcctaaagcagcattttattgagtttgaattattaaaggtacagaggaaatgtggtgatgtagaacttttcctaacacaggtatctaggaagtaagtgctgagttgattttctaggttcttacgtatttgaaaaataaaattgcaattcgagataagtgcttgagcactctacttaagtattctctgtgttttatgaagagaaaatgatctgattttcccttatacttcattttacaatacatattcccttttaacttaaaaaaattgtaaatgtgggagaaaaaaccctgcaggatggaaacaattattaagaatgtagatcaataagtactttttagtgatgtggcagaaatccctgttgattctaagttttagagtgtcttttcccctatttctgacctacaactataaactactctctattaggagaactagaccactttcttcattcttttctaaactgctgcagattgccgtgaactctatcaatagtctcttttccgcaggcaaagtggcattttctaaacatgtttgcttactgccaggtggtttgaaatctatgatttactgcagtagtatgtgcttaaaacaactgttgaggtcttttaagcaggaaagttcaaaaggaagtgtcctgataatggtactggtttttctacaaatataagtagtcattagaagtttgcaaccaccaccaagtctgagagaactctgggatattctgtgggtttggcatattagatagagaaaatgacagatctagatgaagggagcttttggatgtgtgcctttaaaaactgattatgtataaatactgatatttcacatacggagatatttgaagacccaagtctgcctttcacagagccctccattccaagtttagtttttgtcaaaatatgaatcattttatttgactgtactatcagtacacaaatgcatgagtatgtttatacagtgttagactgatgtgaatttgcatttgttacattacattgccagcgcatatcatttagcaagttggcattaacatttatgctttaattaaatgccagtatacctatgtgtgcagcagtaaaaaattagtgagaaaaagcaactttttgtcactcttaggaaatattttgtcttattagtgttcttggcacatgtatattactaaagtagataattccaatgagaaatactaccagattattgttataaaattaatttacaatgtccctgatattgagctaactcttaaaaaaaccaaacaaaactcgtatctgagtgtaactttgccaatattttaaaagccaaaatattctctggacaacaaatttgtattgctcagggacagtttaccttgcctggtaaaccttcccaaacagaaatatagctatactatctttggttttgt

SEQ ID NO: 1453 - protein, 108 aa, Homo sapien
MWQKSLLILSFRVSFPLFLTYNYKLLSIRRTRPLSSFFSKLLQIAVNSINSLFSAGKVAFSKHVCLLPGGLKSMIYCSSMCLKQLLRSFKQESSKGSVLIMVLVFLQI

SEQ ID NO: 1454 - DNA, 1082 bp, Homo sapien
  Unsure 61: Unknown base
gagagccagaggccactctttattgctttttttctcaggcttctgcttgtgtgatcagggnaagggatcccacatatgggaatggttagtggcttttgggactctccaggagcctctgttttaagaatgaggccaaatgtgcaggctcaggccaagcggcagagatgaatgaggtgatgaccacagccttgatccggcaggagctcagagatgcccgggaagacggggggcccgaacggaagcagaaaaacacttatggccgctgggaagttgggagagcgaggctggggctctggcaggcccagggaaagttccctgtctaggctctttattaaaaaatttaaaaggaggagttgaggcaccttgaatattccttcgcgagtcttggagactagccgatttttcatgaagcaagcaaagaccgcggtcccggatcctgcaacttctacctcattttctccaggcctctccacttgcccgagctctcagccaccaggagacagatggaaggggcttctggattgcgttgggagcgggcactgtcccctacccactcctgctcagtttcccaaagtccagcgacttccgaccctccttggggggaaaaataccagtacccagacacctttgcaccctgttatatgactgggcttgcttcaggaatatcttacaaagaaaagaagaagaaagaacggcttggagtcatgtttacatctagttctactgatccgttcacatctggagagtttatttataactccctctataactctctgtttggagacactgtggctctattgacagactgatatctaggaaatattgctctatgtctaaccgtacctaaatgtgctgtggttgtatttacagatttatgtttgagggaaatataactatttccattgtatttgtgcatatacagtagttataggagcagatttatatatgggaaaatatacgactctcttacagccatccagctttatgtacatttgatatcctgacagatttatatctctgaacagctatattgatcaaaacgtatattgttagaattatgtgtccgaagattttttcttatt

SEQ ID NO: 1455 - protein, 79 aa, Homo sapien
MKQAKTAVPDPATSTSFSPGLSTCPSSQPPGDRWKGLLDCVGSGHCPLPTPAQFPKVQRLPTLLGGKNTSTQTPLHPVI

SEQ ID NO: 1456 - DNA, 1517 bp, Homo sapien
ctgcgcctggcgtcaccgaccggtgcggacaggaagaggctctgggctggcacatgtgtatggcggtgaggcgggcgggtacatggcgggctctgtgggactggcgttgtgcgggcagacgttggtggtgcggggcggcagccgattcctggccacctccatagcaagcagtgatgatgacagcctcttcatctatgactgcagtgctgcagaaaagaagtcacaagaaaataaaggggaggacgcgcccttggaccaggggagcggtgcgattctggcgtccaccttctccaagtctggcagctattttgctttaaccgatgacagtaagcgtctgattcttttccgtacaaaaccatggcaatgtctgagtgtcaggaccgtggcaaggaggtgtacagccctgactttcatagcctcggaggagaaggtcttggtggccgacaagtctggagacgtctactccttttcggtgctggagccacacgggtgtggccgtctagagctggggcacctgtctatgctgttagatgtggctgtgagtcctgatgaccgcttcatcctcactgccgaccgggacgagaagatccgagtcagctgggccgcggcgccccatagcatcgagtccttctgcttggggcacacagagtttgtgagccgtatctccgtggtgccaactcagcccgggctgcttctgtcctcctctggggacggcaccctgaggctctgggagtacaggagcggccgccagctgcactgctgtcacctggccagtctgcaggagctggtggacccccaggccccccagaagtttgccgcgtccaggattgcattctggtgccaggagaactgcgtggcgctcctgtgcgacggcactcctgtggtctacatcttccagctggacgcccgcagacagcagttggtgtacaggcagcagctggcgttccagcaccaagtgtgggacgtggctttcgaggagacccaggggctgtgggtgctccaggactgccaggaagcccccctggtgctctacaggcctgtgggcgaccagtggcagtctgttcctgagagcaccgtgttaaagaaagtctctggtgttcttcgtgggaactgggccatgctggaaggctctgccggcgcagacgccagcttcagcagtctctacaaggccacgttcgacaacgtgacctcctacctgaagaagaaagaggagagactgcagcagcagctagagaagaagcagcggcgccggagtcccccgcctgggcccgacgggcatgccaagaagatgagaccgggggaggcgacgctaagttgctgatcgtggcggtctgtttctgtcgactgtggaccacttatgtgcgatccgtggaccacttgcgtgcgatctgtcggccgacgatgagcttgttcggatgtagctccatcgtaagtcgaggagcatctgtgatttgtcctctgcttatgggatatgtttttccgctactgagtctgtgtagtaaatttttgactaggaa

SEQ ID NO: 1457 - protein, 412 aa, Homo sapien
MAGSVGLALCGQTLVVRGGSRFLATSIASSDDDSLFIYDCSAAEKKSQENKGEDAPLDQGSGAILASTFSKSGSYFALTDDSKRLILFRTKPWQCLSVRTVARRCTALTFIASEEKVLVADKSGDVYSFSVLEPHGCGRLELGHLSMLLDVAVSPDDRFILTADRDEKIRVSWAAAPHSIESFCLGHTEFVSRISVVPTQPGLLLSSSGDGTLRLWEYRSGRQLHCCHLASLQELVDPQAPQKFAASRIAFWCQENCVALLCDGTPVVYIFQLDARRQQLVYRQQLAFQHQVWDVAFEETQGLWVLQDCQEAPLVLYRPVGDQWQSVPESTVLKKVSGVLRGNWAMLEGSAGADASFSSLYKATFDNVTSYLKKKEERLQQQLEKKQRRRSPPPGPDGHAKKMRPGEATLSC

SEQ ID NO: 1458 - DNA, 2224 bp, Homo sapien
gctgacacctgcccagtggaagctggcatccctccccttgtgggttcagagctgcaagaagcaccaggctcggccacttcagaagccccagcctcgacctagcccaccctctcagggccacagtgcagaagcctgcacacctgccaagtctctccgactccttgcagctgctgtcagcatggcccaggctcctgctgacccgggcagagaaggccaccttgaacaaagaatcctgcaggtgctgacagaggctggctccccggtgaaacttgcccagctggtgaaggaatgccaagcacccaagagggagctcaaccaagtcctctaccgaatgaaaaaggagttgaaagtctccctcacatcccctgccacctggtgcttgggcgggactgatcctgaaggcgagggtcctgcagagctggccttgtccagccctgccgagaggccccagcaacatgcagctacaattccagagacccctggccctcagttcagccaacaacgggaggaagacatctacaggtttctcaaagacaatggtccccagagggccctggtcatcgcccaagcactgggaatgaggacagcaaaagatgtgaaccgagacttgtacaggatgaagagcaggcaccttctggacatggatgagcagtccaaagcatggacgatttaccgcccagaagattctggaagaagagcaaagtcagcctcaattatttaccagcacaatccaatcaacatgatctgccagaatggacccaacagctggatttccattgcaaactccgaagccatccagattggacacgggaacatcattacaagacagacagtctccagggaggacggttccgccggtccacgccacctcccttcaatggcaccaggtgattcctcaacttgggggaccctagttgatccctgggggccccaggacatccacatggagcggtccatactgagacgggtgcagctgggacacagcaatgagatgaggctccacggcgtcccgtccgagggccctgcccacatcccccctggcagccccccagtctctgccactgctgccggcccagaagcttcgtttgaagcaagaattcccagtccaggaactcaccctgagggggaagccgcccagagaatccacatgaaatcgtgctttctcgaggacgccaccatcggcaacagcaacaaaatgtctatcagcccaggggtggctggcccaggaggagtcgcagggtctggagagggggagccaggggaggacgcaggtcgtcgtcccgcagacacacaatccagaagtcactttcctcgagacattggtcagcccatcactcccagccactcgaagctcacccccaagctggaaactatgactcttggaaacaggagtcacaaagctgcagaaggcagccactatgtggatgaagcctcacacgaggggagctggtggggaggtgggatttagtgcacagcctcacgtggggcttggacacaggctgggggtgggcgcatgctagggagactagcctgctgctctctgcattccttagcgtcttgtttgacctgcttgcttccagacataacctgcatgaatcagttttgggggaatggacctggcatggggatgggttcaggccaggtcttttgatggccaggagtagatgacagggagttgccttggggaacctttggtgtgccaagaggaggtgggtagatgggagtggggctcggtcccccaggcccaggggactctctccactctttcctgggctcggggcatctgcctggagttaccttccatcatggctacctgctgtggtttgaatgtttgagtcccaacaaaattcatatcaaaacataatcccaactgggtgcagtggctcacgcctgtaatcccagcactttgggaggccgaggcgggcggatcaataggtcaggaaatccagaccgtcctggctaacatggtgaaaccccgtctctactaaaaaaaaaaatacaaaaaattagccgggcgttgtggcgggcacctggagtcccagctactccggaggctgagggaggagaatggtgtgaacccgggaggtggagcttccagtgagccgagatcgcgccactgcactccaggctgggcgacagagcgagactccgtctcaaaaaaataaatacataaataaaaaataaaccacccataaaaaaaaaaaaaaaaaaaaaaaaaaaaaaa

SEQ ID NO: 1459 - protein, 429 aa, Homo sapien
MAQAPADPGREGHLEQRILQVLTEAGSPVKLAQLVKECQAPKRELNQVLYRMKKELKVSLTSPATWCLGGTDPEGEGPAELALSSPAERPQQHAATIPETPGPQFSQQREEDIYRFLKDNGPQRALVIAQALGMRTAKDVNRDLYRMKSRHLLDMDEQSKAWTIYRPEDSGRRAKSASIIYQHNPINMICQNGPNSWISIANSEAIQIGHGNIITRQTVSREDGSAGPRHLPSMAPGDSSTWGTLVDPWGPQDIHMERSILRRVQLGHSNEMRLHGVPSEGPAHIPPGSPPVSATAAGPEASFEARIPSPGTHPEGEAAQRIHMKSCFLEDATIGNSNKMSISPGVAGPGGVAGSGEGEPGEDAGRRPADTQSRSHFPRDIGQPITPSHSKLTPKLETMTLGNRSHKAAEGSHYVDEASHEGSWWGGGI

SEQ ID NO: 1460 - DNA, 1051 bp, Homo sapien
gcagaatcaatatgtgcacagttctctttatcaggcaaaaacacgtttattgagacatgaaatgagaatcaggctgaaggaatcatgcagctgaaagatgattatattcatagaaatgaagagatgaaatattcaaagaagatggctactttattgtgagacttaccactttaacctcatatgttaacagcacctaccaaaaaatgatatgagatagagctaaaatactgaaattgcaaatggacaaaataaatcatgaaaatttgtttattatttcttcaataaatatttctaggtgctttgtgattctttcatttagtcattaaagccattgctttactatattgcgttgccactttaaaaacaagttacttgacattgtttttgacagatttcactatattcttatgtaattaattgattatttctaaaatgtttgaataaactttgtactccctctaaggagtattttattcattcttttaattcccaaatgaactttgaacttacagtgctgttgaatgccttggtaaggacttcttgaaattgcataaactattcttgtaaatggtaaacttgagaattttctttgtttcttttttctctatgtcttaaagaatgcctttagaatctaattcatgttgtatcagataagaatgtttctgtggtttctcgtatcagatgtgtaaagaaattattactgggatgccattggctatgtctctttccccttcatgtaaaaattccaagtgtcagtaaaacttctctataatattttcttaaaaccatttataaatttgtgttataatactccagaaaatcaatgtaataagtggtcatatatatcaccaactatggatatcaaaaagttggggtcacatcagtgctatttatttaattaaaatacattgcatatttctattagcacaaacttctctctaaaaggtctgtgtaactgcttctcatcattatttgattgctgttatgggatcctgtcaaaactgtgtaattgtttattctccattcctcaaatacaaaattgagtaggttg

SEQ ID NO: 1461 - protein, 30 aa, Homo sapien
QNQYVHSSLYQAKTRLLRHEMRIRLKESCS

SEQ ID NO: 1462 - DNA, 284 bp, Homo sapien
tcatttttaaagagactcctgctatgttgcacagacttgtgaattcctggtttcaagttatctttccccctatgtcactcaagtaatgtggactacactcatgtgacaccatgcccatctttatgttgtgtatcttatttttgttttgttttactcttgaatcagctcagtctgaaaatctgtcttttaattcatggggattttttagaatgatttcttggagggttttgtcttttgaatgtgtggtcccttctctgcctagaacttttttttttgaatgagac

SEQ ID NO: 1463 - protein, 56 aa, Homo sapien
MPIFMLCILFLFCFTLESAQSENLSFNSWGFFRMISWRVLSFECVVPSLPRTFFFE

SEQ ID NO: 1464 - DNA, 1442 bp, Homo sapien
  Unsure 21: Unknown base
  Unsure 925-946: Unknown base
tgcctggcctgacatttttanaaaaagttttattttgcacggctctaaacctccatgttattttccagtggtgtagaaggtaccagctaaagtgaaccactatgtaatattaggccattctaaaggaaagatgttccatgtcatcagagatggtaaaataggcagggaaaaaaaaatctttggtaccaaagattacacttgtgtttctacacagcaaaccatttttctttcatgaaaataatatattattaacatgaatatattattttgctattaatgtgaaagttgtctctaaatattttttaattttcaaactcatactttattttcatttgaaatgtttttcacaccttttgcattacataataattttgtggaagcattttgccctttagaataaatattagattgatatagctgaaatgtgacttccagttctttgatattccccttgttattcaaatagaaatatggaaatgctttatatattactgttaaatttcttagtgcagaaataacattattaatagagtattgttttcaaaacagatgattaatttcaagaggtttaacagtgaaattgtgtcaatattttgcatttaaaatgaatttaattgaccgatattttctgtagttaaatttagtcacaatatcacatatgttcttcaagaaacacatgaaattattaataaagtaattaaaaaatttttaatgtataacagaattgaccaataggccagttttctggtaacttatgatagtagattgtttctttagaaactgggcagaagctctgcattctcacttgtactttgatttcttatttcttggtcaggcaatttgaggaaagaagaaatggcatggggaatatatatgttttgtttcttagggaaaacagtctgagaaatgaataaaaagcatgaannnnnnnnnnnnnnnnnnnnnntaccatggaaaaggatattcacagtagtacagttctcaatatttttaattagatgtcatatttttttaatatagtaaaaccttgggatatagaatattacatcttttgagaatgtatgtgtctctaagtaagtaaaatctaatgcgtataggagactgatagctaaaaatgaatggaacattaatgtacttttataattaaacctcttatctatcagaaattgtaagagaatagatacatgttttgaatgtaaagttgaaaagtctggtttactgaataaattgaaagtgatttataaaatctaaatttggactacttgcaaatgataagctattctagtagcctttagtttaaatccaacagaaatctagaagtcacaagcaaatatcttaaaggtaaaatccatctgggcactcatttaaagtatatcttaaaaaagcagcagcaaggtaccttgccatttttagcatattttcttcctttttcttttttcttt

SEQ ID NO: 1465 - protein, 30 aa, Homo sapien
  unsure 7: unknown amino acid
PGLTFLXKVLFCTALNLHVIFQWCRRYQLK

SEQ ID NO: 1466 - DNA, 728 bp, Homo sapien
gactttgtaaactgatttcagagaagcgattaaggaattgtactgtctttaaacaatatttagaatgcttcagtaaaagcatttttaaaaaatttttctaatgatgtagtaaatgtacctaatataaagttaagtggttttatttaatacttttcacctgaccatgattatgttataaataagaggatttatagtttgcatgcctgatataatctatttaatttcctttacaaaatttttgtacatgaaagataaatgtcttcattttaccagctacctccttccagattgaatgcttcagtgcactttgattttcaaattggctattattttttaatgtaattaaccttcacaatttaaattgaaggatattctgatccttaggttataaatatgtgacttgatggtttatgtaacattcaagtagcatgttttctataacaatatgataaaagttttgatacataccttgtatgttgcttgacagatctgttttagaaaacattcctctgccttttgaaatgaagccatgtatttgaaattatttcccaaacaattatatcttaagcgtgtgctacatagtaatcatagtcattttaatttagattataaagctatattttaactttgaggtttgtgaattttcttagacatattaatgactttatagttaatggtgctctcagattttatttttaagttaaaaatttgccaggcgcggtggctca

SEQ ID NO: 1467 - protein, 32 aa, Homo sapien
LCKLISEKRLRNCTVFKQYLECFSKSIFKKFF

SEQ ID NO: 1468 - DNA, 960 bp, Homo sapien
  Unsure 391-407: Unknown base
  Unsure 781-804: Unknown base
cctttcctttctttttaaataggcaatcaatatctgattttatgaatgtctgccattgtgcatgattcagctaagtaagccctaatgagaattcaaaggttatgacgacttagtcataggagtctataatctaatgcagaaaagagatttacaaagcataacaaggcagtgttttatgttatgatataggtacggtgaaatgagtttagggaaggaagccggggaaggcttcgtagtaaaagtggcatttagtagaactcatgacgagctgagggatgccaatagtgaaaaggcaatgatgtcaagactgtaaagctaaggctgtttagtgaatagagtattccagtttacctagagtacaagttatgtgtgtaagtaaggccttgtcctnnnnnnnnnnnnnnnnntcagtctagtgaggaaaaaatgtaaataaacaaatgaatgagtacattttgcattctgagttatgcagaaagtgctttgcaacatagaggaaaaagccctaactgttgtggtggttgagagttgattggaaagcctcatggcgggctgagtcttgatggagcagtactttgcccagtggaaataagaagaaagcatatagaagttctccttatcctttggacttgcaatacacacaaaactttctggggctttctaaggaaattttatttcaagattctgctaggcaataactctccttccttaaattgaagggtaaggactctaagttctgctttttcttttctcactgaatttgcttaggtttttttttcgnnnnnnnnnnnnnnnnnnnnnnnncacctttctcactggtattgatcactttctcttccttagtaaagctccatttgcttctctcctaacctggacattataggaagcactgatgctgtattaaaatttagagaaagctcccagtctgtctttcccaacatcccttcagtttcaataagc

SEQ ID NO: 1469 - protein, 20 aa, Homo sapien
FPFFLNRQSISDFMNVCHCA

SEQ ID NO: 1470 - DNA, 313 bp, Homo sapien
gttttcaaaggcactctgttaggtggcatacagccctgattaaaaacagcactgaacttagacatgtttcatttttttctctaacctagtaccttttttacagattgcatattaacagcttatttttgcatttacctctgtaaaccctcaatcaaaatttatttaaaatattgggagcttttagtttaaagtgatacctactggcccctcaaaacatccagcattaaaaaactaagactggcagtgaaataattatcaaaattataggaagaattttcatttagccagaactgaattgaaaaatccatttggt

SEQ ID NO: 1471 - protein, 28 aa, Homo sapien
FQRHSVRWHTALIKNSTELRHVSFFSLT

SEQ ID NO: 1472 - DNA, 643 bp, Homo sapien
atgcttcttccccaaggcagcatcaaattttgaattaatttttgctgcttaataaggacttaaactggtacccaagtcagaaagactctgcctctaattttctggggcttggggatgaagataaagtgttacacccagtgtttgtccaccacagtctgtggggcagagagacccttcctgggactgaattctcaatttgaagcactgttgttcaaagatctcccttctgggtctgacaagaagaaacataacccttatttattgcattcttctggcttacatacattgccctcactaatcaatggacatttcagcatttcattactaattttgagagaaggccaccatggaatttaataaaaatattattgaagagaattgccatcattctccattttccctgaactaccacaagcttctcagaattttagacaaatgtttttcccctcagaactgagcatcagtgctgctttggaaaaacattccatgtgaatactgtggtttcagtgtcaggacctgtacttgggcagttggcaagagagtgtgccagttttttattgggagatgggaacacccaatttaattgatgcaattaggttgtaggttttttacagtttttcttttcttttctttttctttttct

SEQ ID NO: 1473 - protein, 80 aa, Homo sapien
MKIKCYTQCLSTTVCGAERPFLGLNSQFEALLFKDLPSGSDKKKHNPYLLHSSGLHTLPSLINGHFSISLLILREGHHGI

SEQ ID NO: 1474 - DNA, 792 bp, Homo sapien
gctcatgtctaggctgagagtgagataggagccactggaagaatgagatgattcagacaagagattgtaggagattggcttattctgttgacaagatggtaatccgacttattttttggttttttggtgttggtggtttaggaagacaggaacttctccacacccggtagagttcagctgccttttcattagtcagcaagcagtttttcctttctcaaggcagtccacatccagcaaaacatttgattaactggaaagcaataccattctcatgccagtgtacaaattacatgaaagagcatcatttttctagtgtctgaggattggctgcttatggccaattttggcagcaaaacgataggattaaaaatagcttgaagatgatctagtcttaaataatatatttcatgatgaactttccttgggaaagtgcatctttctgcctacaagaatcacatgacccctttcaataatttatgtagtagagaaaaacacactatttctcatagagttttcagtcatgtgctgtggtgtgattgtttctggacattcataaaattttatagttaactgagttctcttttctgttttgttgctatttaacgtccattgaaaacatggctttcttttgcgcattctgttactttcagctgtactttctaataagaatggattgccctttttagcaatctttgattgaactggtacatttcagattacttaaatgtcatcaggccacacagcataccaggtaacagaaagccataaattaaaaataaaaaaaaggcaagc

SEQ ID NO: 1475 - protein, 22 aa, Homo sapien
MSSGHTAYQVTESHKLKIKKRQ

SEQ ID NO: 1476 - DNA, 301 bp, Homo sapien
agttaagtaaatcaccccaattttttctaatatttaagtgaacatttaaagataagcatttcttaatgttaatttcttttctttcatgtaatcttgtcagtagacaaatgatggtgactatattctgtaataagtacatatattatgattaaaaaaaaaagcgtgtactatctgcccaaagagatcataagcactttggagctataaacttcttgtctatttctacttccatggtactgatattctcttctcagataaccaaacaaaaacagctgaataaaatcaaccattaatagtaaaa

SEQ ID NO: 1477 - protein, 28 aa, Homo sapien
MLISFLSCNLVSRQMMVTIFCNKYIYYD
